(19) United States
(12) Patent Application Publication
(10) Pub. No.: US 2022/0244244 A1
(43) Pub. Date: Aug. 4, 2022

(54) A GENETIC PHARMACOPEIA FOR COMPREHENSIVE FUNCTIONAL PROFILING OF HUMAN CANCERS

(71) Applicant: Function Oncology, Inc., San Diego, CA (US)

(72) Inventors: Christian SCHMEDT, El Cerrito, CA (US); Srihari C. SAMPATH, San Diego, CA (US); Srinath C. SAMPATH, San Diego, CA (US)

(21) Appl. No.: 17/619,563

(22) PCT Filed: Jun. 18, 2020
(86) PCT No.: PCT/US20/38503

§ 371 Date: Dec. 15, 2021

Related U.S. Application Data
(60) Provisional application No. 62/865,047, filed on Jun. 21, 2019.

(51) Int. Cl. G01N 33/50; C12N 15/10; C12N 5/09; C12N 15/11; C12N 9/22; C12N 15/86

(52) U.S. Cl. CPC G01N 33/5011; C12N 15/1082; C12N 15/1065; G01N 33/5044; C12N 5/0693; C12N 2740/15043; C12N 9/22; C12N 15/86; C12N 2310/20; C12N 2800/80; C12N 15/11

(57) ABSTRACT

Described herein is a genetic pharmacopeia for interrogating individual cancer susceptibilities to available molecularly targeted therapies.

### CROSS-REFERENCE TO RELATED APPILCATIONS

[0001] This application claims the benefit of U.S. Provisional Patent Application Ser. No. 62/865,047, filed Jun. 21, 2019, which is incorporated herein by reference in its entirety.

### SEQUENCE LISTING

[0002] The instant application contains a Sequence Listing which has been submitted electronically in ASCII format and is hereby incorporated by reference in its entirety. Said ASCII copy, created on Jun. 18, 2020, is named 56322-701_601_SL.txt and is 732,058 bytes in size.

### BACKGROUND OF THE INVENTION

[0003] Human cancers are extraordinarily heterogeneous, differing in DNA sequence, epigenomic landscape, RNA expression, and protein levels, resulting in vast combinatorial complexity in cell behavior. Despite impressive advances in our armamentarium of molecularly targeted anti-cancer therapies, the extreme molecular complexity underlying cancer cell behavior has led to dramatic shortfalls in our ability to predict which patients will benefit from any particular therapy. The lack of an effective means of predicting patient response directly leads to cycles of futile therapy, at enormous opportunity cost to patients and economic cost to both patients and healthcare payers.

### SUMMARY

[0004] The presently disclosed methods seek to provide a rational and personalized selection of therapeutics by determining which molecularly targeted therapy would be effective for a particular patient's disease. In one aspect, the methods comprise determining the functional susceptibility of a patient's cancer cells to a library of perturbagens which model the action of a library of known oncology drugs. Representative perturbagens include components of a gene editing or silencing system capable of knocking out, or knocking down, the genes encoding for the protein targets of the known oncology drugs. For instance, the perturbagens may include gene modulatory reagents such as guide RNA sequences for CRISPR-based gene editing, or RNAi for gene silencing. Accordingly, an exemplary method of functional susceptibility profiling comprises modifying a patient's cancer cells with a library of gene modulatory reagents capable of knocking down, or knocking out, the function of the genes encoding for protein targets of a library of known oncology drugs. In some methods the functionality of all such genes is knocked down or knocked out such that the susceptibility of a patient's cancer to all available molecularly targeted therapies may be interrogated. The modified cancer cells may be screened by next-generation sequencing to determine the effect of the individual genetic perturbations on the viability of the patient's cancer cells. Oncology drugs associated with the perturbagens that reduce viability of the cancer cells may be selected as a putative therapeutic, allowing for personalized selection of a cancer therapeutic.

[0005] In one aspect, provided herein is a method of treating cancer in a subject in need thereof, the method comprising administering to the subject a therapeutic molecule selected from a library of therapeutic molecules; wherein the therapeutic molecule has been selected by a method comprising: modifying cancer cells from the subject to knock down or knock out the function of a plurality of genes, each gene in the plurality of genes encoding for a protein target of a therapeutic molecule in the library of therapeutic molecules, whereby the therapeutic molecule has been selected if knocking down or knocking out the function of the gene that encodes for the protein target of the selected therapeutic molecule impairs cancer cell viability. In some embodiments, the library of therapeutic molecules comprises at least 1, at least 2, at least 3, at least 4, at least 5, at least 10, or at least 20 therapeutic agents of Table 2. In some embodiments, the library of therapeutic molecules comprises at least 1, at least 2, at least 3, at least 4, at least 5, at least 10, or at least 20 therapeutic agents of Table 3. In some embodiments, one or more of the plurality of genes encode for a protein of Table 5B. In some embodiments, one or more of the plurality of genes encode for a protein of Table 5A. In some embodiments, one or more of the plurality of genes encode for a protein of Table 5C. In some embodiments, one or more of the plurality of genes encode for a protein of Table 5D. In some embodiments, one or more of the plurality of genes encode for a protein of Table 4. In some embodiments, one or more of the plurality of genes encode for a protein of Table 3.

[0006] In another aspect, provided herein is a method of treating cancer in a subject in need thereof, the method comprising administering to the subject a therapeutic molecule selected from a library of therapeutic molecules; wherein the cancer of the subject has been determined to be susceptible to the selected therapeutic molecule by a method comprising: (a) contacting a sample of cancer cells from the subject with a library of gene modulatory reagents to generate a plurality of modified cancer cells, wherein each modified cancer cell harbors one or more of the gene modulatory reagents, and each gene modulatory reagent is capable of knocking down or knocking out the function of a gene that encodes a protein target of a therapeutic molecule in the library of therapeutic molecules, and (b) sequencing the plurality of modified cancer cells, wherein a gene modulatory reagent that impairs cell viability will have fewer sequence reads than a gene modulatory reagent that does not impair cell viability, and the gene that is knocked down or knocked out by the gene modulatory reagent that impairs cell viability encodes for the protein targeted by the selected therapeutic molecule. In some embodiments, prior to sequencing, one or more of the plurality of modified cancer cells have been propagated. In some embodiments, propagation comprises maintenance of the modified cancer cells in a 2D in vitro culture. In some embodiments, propagation comprises maintenance of the modified cancer cells in a 3D in vitro culture. In some embodiments, propagation comprises maintenance of the modified cancer cells in vivo. In some embodiments, propagation occurs within an animal model. In some embodiments, the animal is a rodent. In some embodiments, the cancer cells are primary cancer cells.

[0007] In some embodiments, contacting comprises introducing the one or more gene modulatory reagents into each cancer cell by a viral or non-viral delivery method. In some embodiments, one or more of the gene modulatory reagents in the library are encoded on a viral vector. In some embodiments, the viral vector comprises a lentiviral vector, adenoviral vector, or adeno-associated viral vector. In some embodiments, the non-viral delivery method comprises transposase-mediated transposition.

[0008] In some embodiments, the library comprises from about 10 to about 2,000, from about 10 to about 500, from about 10 to about 200, from about 10 to about 150, from about 50 to about 500, from about 50 to about 200, from about 50 to about 2,000, from about 100 to about 2,000, or from about 500 to about 2,000 different gene modulatory reagents. In some embodiments, one or more gene modulatory reagents from the library of gene modulatory reagents comprises a nucleic acid sequence homologous to at least about 15 contiguous nucleotides of a gene encoding a protein of Tables 3-5D. In some embodiments, one or more gene modulatory reagents from the library of gene modulatory reagents comprises a nucleic acid sequence homologous to at least about 15 contiguous nucleotides of a gene encoding a protein of Table 5B. In some embodiments, one or more gene modulatory reagents from the library of gene modulatory reagents comprises a nucleic acid sequence homologous to at least about 15 contiguous nucleotides of a gene encoding a protein of Table 5C. In some embodiments, one or more gene modulatory reagents from the library of gene modulatory reagents comprises a nucleic acid sequence homologous to at least about 15 contiguous nucleotides of a gene encoding a protein of Table 5D. In some embodiments, the homology is at least about 90% sequence homology. In some embodiments, the homology is at least about 90% sequence identity. In some embodiments, the library of therapeutic molecules comprises at least 1, at least 2, at least 3, at least 4, at least 5, at least 10, or at least 20 therapeutic agents of Table 2. In some embodiments, the library of therapeutic molecules comprises at least 1, at least 2, at least 3, at least 4, at least 5, at least 10, or at least 20 therapeutic agents of Table 3.

[0009] In some embodiments, the cancer comprises at least one cancer chosen from the group comprising acute lymphoblastic leukemia (ALL), acute myeloid leukemia (AML), adrenocortical carcinoma, AIDS-related cancers, Kaposi sarcoma, AIDS-related lymphoma, primary CNS lymphoma, anal cancer, appendix cancer, astrocytomas, atypical teratoid/rhabdoid tumor, central nervous system cancers, basal cell carcinoma of the skin, bile duct cancer, bladder cancer, bone cancer, brain tumors, breast cancer, bronchial tumors, Burkitt lymphoma, carcinoid tumor, cardiac tumors, central nervous system cancers, embryonal tumors, germ cell tumor, primary CNS lymphoma, cervical cancer, cholangiocarcinoma, chordoma, chronic lymphocytic leukemia (CLL), chronic myelogenous leukemia (CML), chronic myeloproliferative neoplasms, colorectal cancer, craniopharyngioma, cutaneous t-cell lymphoma, ductal carcinoma in situ (DCIS), embryonal tumors, central nervous system cancer, endometrial cancer, ependymoma, esophageal cancer, esthesioneuroblastoma, Ewing sarcoma, extracranial germ cell tumor, extragonadal germ cell tumor, eye cancer, intraocular melanoma, retinoblastoma, fallopian tube cancer, fibrous histiocytoma of bone, osteosarcoma, gallbladder cancer, gastric cancer, gastrointestinal carcinoid tumor, gastrointestinal stromal tumors (GIST), testicular cancer, gestational trophoblastic disease, hairy cell leukemia, head and neck cancer, heart tumors, hepatocellular cancer, Hodgkin lymphoma, hypopharyngeal cancer, intraocular melanoma, islet cell tumors, pancreatic neuroendocrine tumors, kidney cancer, Langerhans cell histiocytosis, laryngeal cancer, leukemia, lip and oral cavity cancer, liver cancer, lung cancer (non-small cell and small cell), lymphoma, male breast cancer, malignant fibrous histiocytoma of bone and osteosarcoma, melanoma, intraocular melanoma, Merkel cell carcinoma, mesothelioma, metastatic cancer, metastatic squamous neck cancer with occult primary, midline tract carcinoma with NUT gene changes, mouth cancer, multiple endocrine neoplasia syndromes, multiple myeloma/plasma cell neoplasms, mycosis fungoides, myelodysplastic syndromes, myelodysplastic/myeloproliferative neoplasms, myelogenous leukemia, chronic (CML), myeloid leukemia, acute (AML), nasal cavity and paranasal sinus cancer, nasopharyngeal cancer, neuroblastoma, non-Hodgkin lymphoma, non-small cell lung cancer, oral cancer, oropharyngeal cancer, ovarian cancer, pancreatic cancer, pancreatic neuroendocrine tumors (islet cell tumors), papillomatosis, paraganglioma, paranasal sinus and nasal cavity cancer, parathyroid cancer, penile cancer, pharyngeal cancer, pheochromocytoma, pituitary tumor, plasma cell neoplasm/multiple myeloma, pleuropulmonary blastoma, primary central nervous system (CNS) lymphoma, primary peritoneal cancer, prostate cancer, rectal cancer, recurrent cancer, renal cell cancer, retinoblastoma, rhabdomyosarcoma, salivary gland cancer, sarcoma, rhabdomyosarcoma, vascular tumors, osteosarcoma, soft tissue sarcoma, uterine sarcoma, Sézary syndrome, skin cancer, small intestine cancer, squamous cell carcinoma of the skin, squamous neck cancer with occult primary, stomach cancer, T-cell lymphoma, testicular cancer, throat cancer, nasopharyngeal cancer, oropharyngeal cancer, hypopharyngeal cancer, thymoma and thymic carcinoma, thyroid cancer, transitional cell cancer of the renal pelvis and ureter, ureter and renal pelvis, urethral cancer, uterine cancer, endometrial, uterine sarcoma, vaginal cancer, vascular tumors, vulvar cancer, Wilms tumor, and other childhood kidney tumors.

[0010] In some embodiments, one or more of the gene modulatory reagents each comprise a guide RNA (gRNA) sequence comprising at least about 90% homology to a sequence selected from SEQ ID NOS: 1-2789, 2980-3071. In some embodiments, one or more of the gene modulatory reagents each comprise a guide RNA (gRNA) sequence comprising at least about 90% homology to a sequence selected from SEQ ID NOS: 1526-2789. In some embodiments, one or more of the gene modulatory reagents each comprise a guide RNA (gRNA) sequence comprising at least about 90% homology to a sequence selected from SEQ ID NOS: 2980-3071. In some embodiments, the at least about 90% homology is at least about 90% identity. In some embodiments, one or more of the gene modulatory reagents comprise a guide RNA (gRNA) sequence comprising homology to at least a portion of the gene that encodes a protein target of a therapeutic molecule in the library of therapeutic molecules. In some embodiments, the gRNA comprises homology to about 10 to about 50 contiguous nucleotides of the gene. In some embodiments, the homology is at least about 90% sequence homology. In some embodiments, the homology is at least about 90% sequence identity. In some embodiments, the sample of cancer cells is contacted with an endonuclease. In some embodiments, the endonuclease comprises a Cas9 or Cas12a endonuclease. In some embodiments, the Cas9 or Cas12a endonuclease is selected from S. pyogenes Cas9 (SpCas9), SpCas9 D1135E variant, SpCas9 VRER variant, SpCas9 EQR variant, xCas9, SpCas9-NG, S. aureus Cas9 (SaCas9), Acidaminococcus sp. (AsCpfl), Lachnospiraceae bacterium (LbCpfl), AsCpfl RR variant, LbCpfl RR variant, AsCpfl RVR variant, C. jejuni Cas9 (Cj Cas9), N meningitidis (NmCas9), S. thermophilus (StCas9), T. denticola (TdCas9), and Mad7. In some embodiments, the endonuclease does not comprise a Cas9 or Cas12a endonuclease. In some embodiments, the gRNA is positioned within a vector. In some embodiments, the vector further comprises genetic elements of a virus. In some embodiments, the virus comprises an adenovirus, retrovirus, adeno-associated virus (AAV), pox virus, parvovirus, baculovirus, measles virus, herpes simplex virus (HSV), Moloney Murine Leukemia Virus (MoMLV, MMLV, MuLV, or MLV), Murine Stem cell Virus (MSCV), or human immunodeficiency virus (HIV), or a combination thereof In some embodiments, the vector further comprises an auxiliary nucleic acid sequence. In some embodiments, the auxiliary nucleic acid sequence comprises a sequence encoding a marker, an antibiotic resistance cassette, and surface epitope expression cassette. In some embodiments, the marker is a fluorescent marker. In some embodiments, the auxiliary nucleic acid allows for the selection of cancer cells that have been modified to harbor the one or more gene modulatory reagents.

[0011] In some embodiments, one or more of the gene modulatory reagents comprise a short hairpin RNA (shRNA) sequence comprising homology to at least a portion of the gene that encodes a protein target of a therapeutic molecule in the library of therapeutic molecules. In some embodiments, the shRNA comprises homology to about 10 to about 50 contiguous nucleotides of the gene. In some embodiments, the homology is at least about 90% sequence homology. In some embodiments, the homology is at least about 90% sequence identity. In some embodiments, the shRNA is positioned within a vector. In some embodiments, the vector further comprises genetic elements of a virus. In some embodiments, the virus comprises an adenovirus, retrovirus, adeno-associated virus (AAV), pox virus, parvovirus, baculovirus, measles virus, herpes simplex virus (HSV), Moloney Murine Leukemia Virus (MoMLV, MMLV, MuLV, or MLV), Murine Stem cell Virus (MSCV), or human immunodeficiency virus (HIV), or a combination thereof. In some embodiments, the vector further comprises an auxiliary nucleic acid sequence. In some embodiments, the auxiliary nucleic acid sequence comprises a sequence encoding a marker, an antibiotic resistance cassette, or surface epitope expression cassette. In some embodiments, the marker is a fluorescent marker. In some embodiments, the auxiliary nucleic acid allows for the selection of cancer cells that have been modified to harbor the one or more gene modulatory reagents.

[0012] In another aspect, provided herein is a method of generating a plurality of modified cancer cells from a subject having cancer, the method comprising delivering a library of gene modulatory reagents to a sample of cancer cells from the subject to generate the plurality of modified cancer cells; wherein each modified cancer cell harbors one or more of the gene modulatory reagents, and each gene modulatory reagent is capable of knocking down or knocking out the function of a gene that encodes a protein target from a library of protein targets. In some embodiments, one or more of the gene modulatory reagents comprises a guide RNA (gRNA) sequence comprising homology to at least a portion of the gene whose function is knocked down or knocked out in the modified cancer cell. In some embodiments, the gRNA comprises homology to about 10 to about 50 contiguous nucleotides of the gene. In some embodiments, the homology is at least about 90% sequence homology. In some embodiments, the homology is at least about 90% sequence identity. In some embodiments, one or more of the gene modulatory reagents each comprise a guide RNA (gRNA) sequence comprising at least about 90% homology to a sequence selected from SEQ ID NOS: 1-2789, 2980-3071. In some embodiments, one or more of the gene modulatory reagents each comprise a guide RNA (gRNA) sequence comprising at least about 90% homology to a sequence selected from SEQ ID NOS: 1526-2789. In some embodiments, one or more of the gene modulatory reagents each comprise a guide RNA (gRNA) sequence comprising at least about 90% homology to a sequence selected from SEQ ID NOS: 2980-3071. In some embodiments, the homology is at least about 90% identity. In some embodiments, the sample of cancer cells is contacted with an endonuclease. In some embodiments, the endonuclease comprises a Cas9 or Cas12a endonuclease. In some embodiments, the Cas9 or Cas12a endonuclease is selected from S. pyogenes Cas9 (SpCas9), SpCas9 D1135E variant, SpCas9 VRER variant, SpCas9 EQR variant, xCas9, SpCas9-NG, S. aureus Cas9 (SaCas9), Acidaminococcus sp. (AsCpfl), Lachnospiraceae bacterium (LbCpfl), AsCpfl RR variant, LbCpfl RR variant, AsCpfl RVR variant, C. jejuni Cas9 (Cj Cas9), N. meningitidis (NmCas9), S. thermophilus (StCas9), T. denticola (TdCas9), and Mad7. In some embodiments, the endonuclease does not comprise a Cas9 or Cas12a endonuclease. In some embodiments, the gRNA is positioned within a vector. In some embodiments, the vector further comprises genetic elements of a virus. In some embodiments, the virus comprises an adenovirus, retrovirus, adeno-associated virus (AAV), pox virus, parvovirus, baculovirus, measles virus, herpes simplex virus (HSV), Moloney Murine Leukemia Virus (MoMLV, MMLV, MuLV, or MLV), Murine Stem cell Virus (MSCV), or human immunodeficiency virus (HIV), or a combination thereof In some embodiments, the vector further comprises an auxiliary nucleic acid sequence. In some embodiments, the auxiliary nucleic acid sequence comprises a sequence encoding a marker, an antibiotic resistance cassette, or surface epitope expression cassette. In some embodiments, the marker is a fluorescent marker. In some embodiments, the auxiliary nucleic acid allows for the selection of cancer cells that have been modified to harbor the one or more gene modulatory reagents.

[0013] In some embodiments, one or more of the gene modulatory reagents comprise a short hairpin RNA (shRNA) sequence comprising homology to at least a portion of the gene whose function is knocked down or knocked out in the modified cancer cell. In some embodiments, the shRNA comprises homology to about 10 to about 50 contiguous nucleotides of the gene. In some embodiments, the homology is at least about 90% sequence homology. In some embodiments, the homology is at least about 90% sequence identity. In some embodiments, the shRNA is positioned within a vector. In some embodiments, the vector further comprises genetic elements of a virus. In some embodiments, the virus comprises an adenovirus, retrovirus, adeno-associated virus (AAV), pox virus, parvovirus, baculovirus, measles virus, herpes simplex virus (HSV), Moloney Murine Leukemia Virus (MoMLV, MMLV, MuLV, or MLV), Murine Stem cell Virus (MSCV), or human immunodeficiency virus (HIV), or a combination thereof. In some embodiments, the vector further comprises an auxiliary nucleic acid sequence. In some embodiments, the auxiliary nucleic acid sequence comprises a sequence encoding a marker, an antibiotic resistance cassette, or surface epitope expression cassette. In some embodiments, the marker is a fluorescent marker. In some embodiments, the auxiliary nucleic acid allows for the selection of cancer cells that have been modified to harbor the one or more gene modulatory reagents.

[0014] In some embodiments, delivery comprises transposase-mediated transposition. In some embodiments, the sample of cancer cells comprises primary cancer cells. In some embodiments, the sample of cancer cells comprises about 10⁵ to about 10⁸ cells. In some embodiments, the library comprises from about 10 to about 2,000, from about 10 to about 500, from about 10 to about 200, from about 10 to about 150, from about 50 to about 500, from about 50 to about 200, from about 50 to about 2,000, from about 100 to about 2,000, or from about 500 to about 2,000 different gene modulatory reagents. In some embodiments, at least about 90% of the gene modulatory reagents are present in the library in a quantity within about 10% of the average gene modulatory reagent quantity. In some embodiments, the library of protein targets comprises at least 1, at least 2, at least 3, at least 4, at least 5, at least 10, or at least 20 protein targets of Table 5B. In some embodiments, the library of protein targets comprises at least 1, at least 2, at least 3, at least 4, at least 5, at least 10, or at least 20 protein targets of Table 5A. In some embodiments, the library of protein targets comprises at least 1, at least 2, at least 3, at least 4, at least 5, at least 10, or at least 20 protein targets of Table 5C. In some embodiments, the library of protein targets comprises at least 1, at least 2, at least 3, at least 4, at least 5, at least 10, or at least 20 protein targets of Table 5D. In some embodiments, the library of protein targets comprises at least 1, at least 2, at least 3, at least 4, at least 5, at least 10, or at least 20 protein targets of Table 4. In some embodiments, the library of protein targets comprises at least 1, at least 2, at least 3, at least 4, at least 5, at least 10, or at least 20 protein targets of Table 3. In some embodiments, the sample of cancer cells has been processed to preserve cell viability.

[0015] In some embodiments, the method further comprises preparing the sample of cancer cells to preserve cell viability prior to and/or after delivery of the library of gene modulatory reagents. In some embodiments, the method further comprises propagating the modified cancer cells. In some embodiments, propagation comprises maintenance of the modified cancer cells in a 2D in vitro culture. In some embodiments, propagation comprises maintenance of the modified cancer cells in a 3D in vitro culture. In some embodiments, propagation comprises maintenance of the modified cancer cells in vivo. In some embodiments, propagation occurs within an animal model. In some embodiments, the animal model is a rodent.

[0016] In another aspect, provided herein is a compilation comprising a plurality of modified cancer cells, wherein each modified cancer cell harbors one or more gene modulatory reagents, and each gene modulatory reagent is capable of knocking down or knocking out the function of a gene that encodes a protein target from a library of protein targets. In some embodiments, at least one of the one or more gene modulatory reagents comprises a sequence selected from SEQ ID NOS: 1-2789, 2980-3071. In some embodiments, at least one of the one or more gene modulatory reagents comprises a sequence selected from SEQ ID NOS: 1526-2789. In some embodiments, at least one of the one or more gene modulatory reagents comprises a sequence selected from SEQ ID NOS: 2980-3071. In some embodiments, at least one of the one or more of gene modulatory reagents comprises a sequence at least about 90% homologous to a sequence selected from SEQ ID NOS: 1-2789, 2980-3071. In some embodiments, at least one of the one or more of gene modulatory reagents comprises a sequence at least about 90% homologous to a sequence selected from SEQ ID NOS: 1526-2789. In some embodiments, at least one of the one or more of gene modulatory reagents comprises a sequence at least about 90% homologous to a sequence selected from SEQ ID NOS: 2980-3071. In some embodiments, the homology is 90% identity.

[0017] In some embodiments, the library of protein targets comprises at least 1, at least 2, at least 3, at least 4, at least 5, at least 10, or at least 20 protein targets of Table 5B. In some embodiments, the library of protein targets comprises at least 1, at least 2, at least 3, at least 4, at least 5, at least 10, or at least 20 protein targets of Table 5A. In some embodiments, the library of protein targets comprises at least 1, at least 2, at least 3, at least 4, at least 5, at least 10, or at least 20 protein targets of Table 5C. In some embodiments, the library of protein targets comprises at least 1, at least 2, at least 3, at least 4, at least 5, at least 10, or at least 20 protein targets of Table 5D. In some embodiments, the library of protein targets comprises at least 1, at least 2, at least 3, at least 4, at least 5, at least 10, or at least 20 protein targets of Table 4. In some embodiments, the library of protein targets comprises at least 1, at least 2, at least 3, at least 4, at least 5, at least 10, or at least 20 protein targets of Table 3. In some embodiments, one of more of the gene modulatory reagents comprise a guide RNA (gRNA) sequence comprising homology to at least a portion of the gene whose function is knocked down or knocked out in the modified cancer cell. In some embodiments, the gRNA comprises homology to about 10 to about 50 contiguous nucleotides of the gene. In some embodiments, the homology is at least about 90% sequence homology. In some embodiments, the homology is at least about 90% sequence identity.

[0018] In some embodiments, the compilation comprises an endonuclease. In some embodiments, the endonuclease comprises a Cas9 or Cas12a endonuclease. In some embodiments, the Cas9 or Cas12a endonuclease is selected from S. pyogenes Cas9 (SpCas9), SpCas9 D1135E variant, SpCas9 VRER variant, SpCas9 EQR variant, xCas9, SpCas9-NG, S. aureus Cas9 (SaCas9), Acidaminococcus sp. (AsCpfl), Lachnospiraceae bacterium (LbCpfl), AsCpfl RR variant, LbCpfl RR variant, AsCpfl RVR variant, C. jejuni Cas9 (CjCas9), N. meningitidis (NmCas9), S. thermophilus (StCas9), T. denticola (TdCas9), and Mad7. In some embodiments, the endonuclease does not comprise a Cas9 or Cas12a endonuclease.

[0019] In some embodiments, the gRNA is positioned within a vector. In some embodiments, the vector further comprises genetic elements of a virus. In some embodiments, the virus comprises an adenovirus, retrovirus, adeno-associated virus (AAV), pox virus, parvovirus, baculovirus, measles virus, herpes simplex virus (HSV), Moloney Murine Leukemia Virus (MoMLV, MMLV, MuLV, or MLV), Murine Stem cell Virus (MSCV), or human immunodeficiency virus (HIV), or a combination thereof. In some embodiments, the vector further comprises an auxiliary nucleic acid sequence. In some embodiments, the auxiliary nucleic acid sequence comprises a sequence encoding a marker, an antibiotic resistance cassette, or surface epitope expression cassette. In some embodiments, the marker is a fluorescent marker. In some embodiments, the auxiliary nucleic acid allows for the selection of the modified cancer cells.

[0020] In some embodiments, one or more of the gene modulatory reagents comprise a short hairpin RNA (shRNA) sequence comprising homology to at least a portion of the gene whose function is knocked down or knocked out in the modified cancer cell. In some embodiments, the shRNA comprises homology to about 10 to about 50 contiguous nucleotides of the gene. In some embodiments, the homology is at least about 90% sequence homology. In some embodiments, the homology is at least about 90% sequence identity. In some embodiments, the shRNA is positioned within a vector. In some embodiments, the vector further comprises genetic elements of a virus. In some embodiments, the virus comprises an adenovirus, retrovirus, adeno-associated virus (AAV), pox virus, parvovirus, baculovirus, measles virus, herpes simplex virus (HSV), Moloney Murine Leukemia Virus (MoMLV, MMLV, MuLV, or MLV), Murine Stem cell Virus (MSCV), or human immunodeficiency virus (HIV), or a combination thereof. In some embodiments, the vector further comprises an auxiliary nucleic acid sequence. In some embodiments, the auxiliary nucleic acid sequence comprises a sequence encoding a marker, an antibiotic resistance cassette, or surface epitope expression cassette. In some embodiments, the marker is a fluorescent marker. In some embodiments, the auxiliary nucleic acid allows for the selection of the modified cancer cells. In some embodiments, delivering comprising transposase-mediated transposition.

[0021] In some embodiments, the modified cancer cells are modified primary cancer cells. In some embodiments, the compilation comprises from about 10 to about 2,000, from about 10 to about 500, from about 10 to about 200, from about 10 to about 150, from about 50 to about 500, from about 50 to about 200, from about 50 to about 2,000, from about 100 to about 2,000, or from about 500 to about 2,000 different gene modulatory reagents. In some embodiments, the compilation comprises from about 10 to about 2,000, from about 10 to about 500, from about 10 to about 200, from about 10 to about 150, from about 50 to about 500, from about 50 to about 200, from about 50 to about 2,000, from about 100 to about 2,000, or from about 500 to about 2,000 different populations of modified cancer cells.

[0022] In another aspect, provided herein is a method of evaluating the functional effect of genetically modifying cancer cells from a subject, the method comprising: sequencing a plurality of modified cancer cells, wherein each modified cancer cell harbors one or more gene modulatory reagents, each gene modulatory reagent capable of knocking down or knocking out the function of a gene that encodes a protein target in a library of protein targets; and wherein a gene modulatory reagent that impairs cell viability will have fewer sequence reads than a gene modulatory reagent that does not impair cell viability. In some embodiments, the method comprises determining which gene modulatory regents have fewer than a threshold number of sequence reads. In some embodiments, the threshold number of sequence reads is an expected number of sequence reads if the gene modulatory reagent did not impair cell viability. In some embodiments, the threshold number of sequence reads is an average number of sequence reads for each gene modulatory reagent in the plurality of modified cancer cells.

[0023] In some embodiments, the method comprises correlating each gene modulatory reagent that has fewer than the threshold number of sequence reads to its corresponding protein target in the library of protein targets. In some embodiments, the method comprises correlating the corresponding protein target to a therapeutic molecule. In some embodiments, the library of protein targets comprises at least 1, at least 2, at least 3, at least 4, at least 5, at least 10, or at least 20 protein targets of Table 5B. In some embodiments, the library of protein targets comprises at least 1, at least 2, at least 3, at least 4, at least 5, at least 10, or at least 20 protein targets of Table 5A. In some embodiments, the library of protein targets comprises at least 1, at least 2, at least 3, at least 4, at least 5, at least 10, or at least 20 protein targets of Table 5C. In some embodiments, the library of protein targets comprises at least 1, at least 2, at least 3, at least 4, at least 5, at least 10, or at least 20 protein targets of Table 5D. In some embodiments, the library of protein targets comprises at least 1, at least 2, at least 3, at least 4, at least 5, at least 10, or at least 20 protein targets of Table 4. In some embodiments, the library of protein targets comprises at least 1, at least 2, at least 3, at least 4, at least 5, at least 10, or at least 20 protein targets of Table 3.

[0024] In some embodiments, one or more of the gene modulatory reagents each comprise a guide RNA (gRNA) sequence comprising at least about 90% homology to a sequence selected from SEQ ID NOS: 1-2789, 2980-3071. In some embodiments, one or more of the gene modulatory reagents each comprise a guide RNA (gRNA) sequence comprising at least about 90% homology to a sequence selected from SEQ ID NOS: 1526-2789. In some embodiments, one or more of the gene modulatory reagents each comprise a guide RNA (gRNA) sequence comprising at least about 90% homology to a sequence selected from SEQ ID NOS: 2980-3071. In some embodiments, the at least about 90% homology is at least about 90% identity.

[0025] In another aspect, provided herein is a library comprising a plurality of gene modulatory reagents, each gene modulatory reagent capable of knocking down or knocking out the function of a gene that encodes a protein target from a library of protein targets. In some embodiments, the plurality of gene modulatory reagents is capable of knocking down or knocking out the function of at least about 50% of the genes that encode for the protein targets in the library. In some embodiments, the at least about 50% is at least about 60%. In some embodiments, the at least about 60% is at least about 70%. In some embodiments, the at least about 70% is at least about 80%. In some embodiments, the at least about 80% is at least about 90%. In some embodiments, the library of protein targets comprises all known proteins targeted by known drugs capable of treating a particular disease or condition. In some embodiments, the disease or condition is cancer. In some embodiments, the cancer comprises at least one cancer from the group comprising acute lymphoblastic leukemia (ALL), acute myeloid leukemia (AML), adrenocortical carcinoma, AIDS-related cancers, Kaposi sarcoma, AIDS-related lymphoma, primary CNS lymphoma, anal cancer, appendix cancer, astrocytomas, atypical teratoid/rhabdoid tumor, central nervous system cancers, basal cell carcinoma of the skin, bile duct cancer, bladder cancer, bone cancer, brain tumors, breast cancer, bronchial tumors, Burkitt lymphoma, carcinoid tumor, cardiac tumors, central nervous system cancers, embryonal tumors, germ cell tumor, primary CNS lymphoma, cervical cancer, cholangiocarcinoma, chordoma, chronic lymphocytic leukemia (CLL), chronic myelogenous leukemia (CML), chronic myeloproliferative neoplasms, colorectal cancer, craniopharyngioma, cutaneous t-cell lymphoma, ductal carcinoma in situ (DCIS), embryonal tumors, central nervous system cancer, endometrial cancer, ependymoma, esophageal cancer, esthesioneuroblastoma, Ewing sarcoma, extracranial germ cell tumor, extragonadal germ cell tumor, eye cancer, intraocular melanoma, retinoblastoma, fallopian tube cancer, fibrous histiocytoma of bone, osteosarcoma, gallbladder cancer, gastric cancer, gastrointestinal carcinoid tumor, gastrointestinal stromal tumors (GIST), testicular cancer, gestational trophoblastic disease, hairy cell leukemia, head and neck cancer, heart tumors, hepatocellular cancer, Hodgkin lymphoma, hypopharyngeal cancer, intraocular melanoma, islet cell tumors, pancreatic neuroendocrine tumors, kidney cancer, Langerhans cell histiocytosis, laryngeal cancer, leukemia, lip and oral cavity cancer, liver cancer, lung cancer (non-small cell and small cell), lymphoma, male breast cancer, malignant fibrous histiocytoma of bone and osteosarcoma, melanoma, intraocular melanoma, Merkel cell carcinoma, mesothelioma, metastatic cancer, metastatic squamous neck cancer with occult primary, midline tract carcinoma with NUT gene changes, mouth cancer, multiple endocrine neoplasia syndromes, multiple myeloma/plasma cell neoplasms, mycosis fungoides, myelodysplastic syndromes, myelodysplastic/myeloproliferative neoplasms, myelogenous leukemia, chronic (CML), myeloid leukemia, acute (AML), nasal cavity and paranasal sinus cancer, nasopharyngeal cancer, neuroblastoma, non-Hodgkin lymphoma, non-small cell lung cancer, oral cancer, oropharyngeal cancer, ovarian cancer, pancreatic cancer, pancreatic neuroendocrine tumors (islet cell tumors), papillomatosis, paraganglioma, paranasal sinus and nasal cavity cancer, parathyroid cancer, penile cancer, pharyngeal cancer, pheochromocytoma, pituitary tumor, plasma cell neoplasm/multiple myeloma, pleuropulmonary blastoma, primary central nervous system (CNS) lymphoma, primary peritoneal cancer, prostate cancer, rectal cancer, recurrent cancer, renal cell cancer, retinoblastoma, rhabdomyosarcoma, salivary gland cancer, sarcoma, rhabdomyosarcoma, vascular tumors, osteosarcoma, soft tissue sarcoma, uterine sarcoma, Sézary syndrome, skin cancer, small intestine cancer, squamous cell carcinoma of the skin, squamous neck cancer with occult primary, stomach cancer, T-cell lymphoma, testicular cancer, throat cancer, nasopharyngeal cancer, oropharyngeal cancer, hypopharyngeal cancer, thymoma and thymic carcinoma, thyroid cancer, transitional cell cancer of the renal pelvis and ureter, ureter and renal pelvis, urethral cancer, uterine cancer, endometrial, uterine sarcoma, vaginal cancer, vascular tumors, vulvar cancer, Wilms tumor, and other childhood kidney tumors.

[0026] In some embodiments, the known drugs comprise at least 1, at least 2, at least 3, at least 4, at least 5, at least 10, or at least 20 drugs of Table 2. In some embodiments, the known drugs comprise at least 1, at least 2, at least 3, at least 4, at least 5, at least 10, or at least 20 drugs of Table 3. In some embodiments, the library of protein targets comprises at least 1, at least 2, at least 3, at least 4, at least 5, at least 10, or at least 20 protein targets of Table 5B. In some embodiments, the library of protein targets comprises at least 1, at least 2, at least 3, at least 4, at least 5, at least 10, or at least 20 protein targets of Table 5A. In some embodiments, the library of protein targets comprises at least 1, at least 2, at least 3, at least 4, at least 5, at least 10, or at least 20 protein targets of Table 5C. In some embodiments, the library of protein targets comprises at least 1, at least 2, at least 3, at least 4, at least 5, at least 10, or at least 20 protein targets of Table 5D. In some embodiments, the library of protein targets comprises at least 1, at least 2, at least 3, at least 4, at least 5, at least 10, or at least 20 protein targets of Table 4. In some embodiments, the library of protein targets comprises at least 1, at least 2, at least 3, at least 4, at least 5, at least 10, or at least 20 protein targets of Table 3. In some embodiments, one or more of the plurality of gene modulatory reagents each comprise a guide RNA (gRNA) sequence comprising at least about 90% homology to a sequence selected from SEQ ID NOS: 1-2789, 2980-3071. In some embodiments, one or more of the plurality of gene modulatory reagents each comprise a guide RNA (gRNA) sequence comprising at least about 90% homology to a sequence selected from SEQ ID NOS: 1526-2789. In some embodiments, one or more of the plurality of gene modulatory reagents each comprise a guide RNA (gRNA) sequence comprising at least about 90% homology to a sequence selected from SEQ ID NOS: 2980-3071. In some embodiments, the at least about 90% homology is at least about 90% identity.

[0027] In some embodiments, the plurality of gene modulatory reagents is capable of knocking down or knocking out the function of about 10 to about 2,000, from about 10 to about 500, from about 10 to about 200, from about 10 to about 150, from about 50 to about 500, from about 50 to about 200, about 50 to about 2,000, or about 100 to about 2,000 genes. In some embodiments, the library comprises about 10 to about 2,000, from about 10 to about 500, from about 10 to about 200, from about 10 to about 150, from about 50 to about 500, from about 50 to about 200, about 50 to about 2,000, or about 100 to about 2,000 gene modulatory reagents.

[0028] In some embodiments, at least one of the gene modulatory reagents is capable of knocking out the function of a gene. In some embodiments, at least one of the gene modulatory reagents comprise a gRNA sequence having homology to at least a portion of the gene whose function is knocked out by the gene modulatory reagent. In some embodiments, at least one of the gene modulatory reagents is capable of knocking down the function of a gene. In some embodiments, at least one of the gene modulatory reagents comprise a shRNA sequence having homology to at least a portion of the gene whose function is knocked down by the gene modulatory reagent. In some embodiments, the homology is at least about 90% sequence homology. In some embodiments, the homology is at least about 90% sequence identity. In some embodiments, the at least a portion is at least about 15 contiguous nucleotides.

[0029] In some embodiments, at least one of the gene modulatory reagents is positioned within a vector. In some embodiments, the vector comprises an adapter sequence. In some embodiments, the adapter sequence comprises a type IIS restriction enzyme cleavage sites. In some embodiments, the vector further comprises genetic elements of a virus. In some embodiments, the virus comprises an adenovirus, retrovirus, adeno-associated virus (AAV), pox virus, parvovirus, baculovirus, measles virus, herpes simplex virus (HSV), Moloney Murine Leukemia Virus (MoMLV, MMLV, MuLV, or MLV), Murine Stem cell Virus (MSCV), or human immunodeficiency virus (HIV), or a combination thereof In some embodiments, the vector further comprises a sequence encoding a marker, an antibiotic resistance cassette, or surface epitope expression cassette. In some embodiments, the marker is a fluorescent marker.

### BRIEF DESCRIPTION OF THE DRAWINGS

[0030] FIG. 1 is a clinical workflow of a cancer functional susceptibility profiling method described herein.

[0031] FIG. 2 is a schematic of a CRISPR-based platform for personalized functional genomics.

[0032] FIG. 3 is a schematic for identifying cancer therapeutic vulnerabilities in the gene space via CRISPR.

[0033] FIG. 4 is a table of the characteristics of a targeted oncology CRISPR library.

[0034] FIG. 5 shows distribution of gRNA representation in pooled plasmid DNA (left) and transduced cells (right).

[0035] FIG. 6A shows a 3D collagen scaffold containing infected primary tumor cells.

[0036] FIG. 6B shows re-isolated cells demonstrating the outgrowth of the small tumor-derived tumoroids/organoids.

[0037] FIG. 7 shows expression of B2M, demonstrating loss of B2M protein expression at the precise frequency expected based on the relative abundance of B2M-tarting gRNAs in a gRNA library.

[0038] FIG. 8 is a volcano plot of CRISPR library screening in A549 lung carcinoma cells. Core selected genes are shown in dark circles (TOP2A, TUBB, RPL3, TUBG1, PSMB5). Negative control genes are shown in gray circles.

[0039] FIG. 9 is a volcano plot of CRISPR library screening in primary PDX-derived human melanoma tumor cells. The known melanoma driver gene BRAF is identified as a therapeutic vulnerability. Negative control genes are shown in gray circles.

### DETAILED DESCRIPTION OF THE INVENTION

[0040] Most previous efforts in personalized cancer sensitivity testing have focused on treatment of tumor cells with proposed therapeutic small molecules in vitro. However, numerous studies have demonstrated that key differences exist between the behavior of cancer cells in vitro and their corresponding behavior in vivo, including the response of cancer cells to inhibition of various molecular pathways. Indeed, one of the most clinically successful approaches to date for chemosensitivity testing utilizes engraftment of primary patient-derived cancer cells into mice, followed by in vivo treatment of the animals with drugs. This approach is effective but extraordinarily slow (6-12 months), expensive (cost of goods related to compounds and animals; hands-on time for dosing, analysis), and non-comprehensive (i.e. only a few drugs can be tested). As a result, the approach is intrinsically non-scalable.

[0041] Over 300 molecularly targeted therapies are either approved or under study for the treatment of cancer. Each of these drugs (usually a low molecular weight compound, or in some cases an antibody) binds to and, in nearly all cases, inactivates the function of a particular protein target. While it is conceptually appealing to test each of these drugs on an individual patient's cancer cells in order to find effective therapies, this has proven over several decades to be an inherently limited and suboptimal process for a number of reasons: (1) The number of cells required to perform the test limits the number of therapies (drugs) which can be tested. (2) Testing can only be performed in vitro, which differs significantly from the in vivo context in which clinical therapy is performed. (3) Accurate testing depends on knowledge of in vitro drug stability and cellular exposure, which are usually not known. As a result, the data gathered from compound testing in vitro does not reflect achievable in vivo tissue exposure. (4) High cost of goods associated with maintaining validated and updated stocks of all drugs. (5) Testing cannot be performed in a pooled or multiplexed format, raising costs and limiting throughput. These processes are therefore in principle unable to be scaled to commercial levels. (6) Testing cannot be used to identify new targets, i.e. those for which drugs are not already available.

[0042] The presently described methods work by pivoting the currently available suite of anti-cancer therapies from ‘drug space’ to ‘gene space’. Specifically, the methods depend on the critical insight that each protein target of an existing therapy can also be inhibited indirectly via mutagenesis of the gene encoding that protein target, e.g. via gene editing. Thus, the ‘drug pharmacopeia’ can instead be represented by a ‘genetic pharmacopeia’. The genetic pharmacopeia can represent an entire targeted therapy landscape (e.g., for the oncology landscape, over 300 therapeutic molecules are represented), in a genetic format. This may be achieved by designing inhibitory genetic elements, for instance sgRNAs (CRISPR) or shRNAs (RNAi) corresponding to the gene or mRNA respectively of the protein target of each potential therapeutic. Accordingly, the genetic pharmacopeia allows for a genetic determination of the functional susceptibility of cancer cells to known oncology drugs, mitigating the shortcomings described above and as shown in Table 1.

TABLE 1
Mitigating the shortcomings of existing methods with a genetic pharmacopeia.

| Shortcoming of existing solutions | Mitigation via Genetic Pharmacopeia |
|---|---|
| The number of cells required to perform the test | Genetic platform allows pooled screening with |
| limits the number of therapies (drugs) which can | highly parallel, NGS-based readout of target |
| be tested | modulation |
| Testing can only be performed in vitro, which | Testing can be performed in vivo, as well as in |
| differs significantly from the in vivo context in | complex in vitro environments mimicking the in |
| which clinical therapy is performed | vivo context (e.g. 3D matrices, engineered niches) |
| Accurate testing depends on knowledge of in | No knowledge needed of pharmacokinetic or |
| vitro drug stability and cellular exposure, which | chemical properties of existing drug entities |
| are usually not known. As a result, the data | |
| gathered from compound testing in vitro does | |
| not reflect achievable in vivo tissue exposure | |
| High cost of goods associated with maintaining | No pharmacologic stocks are required. Required |
| validated and updated stocks of all drugs | consumable reagents are widely available at |
| | commodity pricing |
| Testing cannot be performed in a pooled or | Tests are performed in a pooled, highly |
| multiplexed format, raising costs and limiting | multiplexed format |
| throughput | |
| Testing cannot be used to identify new targets, | Genetic pools can be designed to support novel |
| i.e. those for which drugs are not already | drug discovery, i.e. for protein targets for which |
| available | no current inhibitor is available, in primary |
| | patient-derived cells |

[0043] In the same way that a chemical pharmacopeia reduces the vast potential drug space (i.e. all LMW chemical structures) to a size that is useful for the selection of therapies in actual practice, a genetic pharmacopeia reduces the complexity of the human genome to a scale suitable for practical use in personalized diagnostics. The limited availability of patient-derived cells, which are usually derived from scant biopsy or resection specimens, and the limited ability to propagate these cells in culture mandates this reduction in complexity, and makes the use of a genetic pharmacopeia indispensable for diagnostics applications. The use of larger (e.g. whole genome) libraries for personalized medicine is simply not feasible, which until now has precluded the use of these technologies for precision medicine.

[0044] In one aspect, provided herein are methods of determining the susceptibility of a disease or condition to a library of therapeutic agents represented by a library of perturbagens which model the action of those therapeutic agents. A clinical workflow of a functional susceptibility profiling method for a patient with cancer is shown in FIG. 1. In an initial step 101, a sample of primary, patient-derived cancer cells is obtained from the patient. In a subsequent step 102, the cancer cells are contacted with a library of gene modulatory reagents which model the function of a library of cancer drugs having known protein targets by editing (e.g., CRISPR-based methods) and/or silencing (e.g., siRNA) the genes encoding for those protein targets. The resulting modified cancer cells are propagated by in vitro 2D culture, in vitro 2.5D/3D culture, or in vivo. This step may involve use of improved 3D in vitro models of in vivo growth, methods for suppression of stromal cell outgrowth, co-culture with autologous or allogenic immune cells (e.g. T cells), or improved methods for xenograft development in vivo, or any combination thereof. To evaluate the effect of each gene perturbation, in a subsequent step 103, the propagated modified cancer cells are tested, e.g., by next generation sequencing (NGS), to obtain a readout regarding which gene modulatory reagents affect the viability of the patient's cancer cells. This step may involve use of developed internal references to calibrate dropout analysis and correct for sample-to-sample variation. A clinical panel 104 is generated identifying the effective gene modulatory reagents and/or corresponding cancer drugs. A clinician, such as an oncologist, or a group of clinicians, such as a tumor board, evaluate the clinical panel 104 and make a clinical decision 106 regarding a course of treatment for the patient. To assist with the clinical decision 106, the unmodified tumor itself may be subjected to DNA sequencing 105.

[0045] In another aspect, the methods described herein facilitate the generation of a discovery panel 107, which may include newly discovered drug targets, e.g., to assist with drug development; newly discovered use(s) of a known drug (drug repurposing); and/or the functional correlation to the discoveries based on whole exome sequencing. These discoveries may be partnered with Biopharmaceutical companies 108 to assist with expansion of drug indications for known drugs; function-based clinical trials of known drugs; development of drugs against newly discovered targets; and/or improvement of sequence-based analyses via deorphanization of variants of unknown significance (VUS).

[0046] The method described in FIG. 1 may further comprise designing the library of gene modulatory reagents used in the functional analysis step 102. The design may involve defining the full targeted pharmacologic landscape by generating a list of all targeted drugs (drug library) for cancer. As an example, the drug library comprises at least one of the cancer drugs of Table 2, e.g., at least about 5, 10, 20, 50, 100, 150, 200, 250, 300, 400, 500, 1000, or 1500 of the drugs listed in Table 2. As another example, the drug library comprises at least one of the cancer drugs of Table -3. In some cases, the drug library comprises a plurality of cancer drugs of Table 3, e.g., at least about 5, 10, 20, 50, 100, 150, 200, 250, 300, 400, 500, 1000, or 1500 of the drugs listed in Table 3. The drug library may comprise all of the targeted drugs for a particular type of cancer. As used herein, “all targeted drugs” may refer to at least about 90%, 95%, or 100% of all FDA-approved drugs for a particular indication, e.g., cancer in general or a particular type of cancer. All targeted drugs may also include investigational drugs, such as drugs undergoing regulatory review, but have not yet been approved, and drugs used in clinical trials or pre-clinical testing.

[0047] The method described in FIG. 1 may further comprise determining the protein and associated gene targets of the drugs in a drug library, such as the drug library comprising one or more cancer drugs of Tables 2-3, e.g., a drug of Table 2. This requires that a target is known or proposed for each drug included in the analysis. In the case of non-specific inhibitors, such as multi-kinase inhibitors, the targets may include multiple gene targets. As a non-limiting example, the library comprises at least one of the targets of Tables 4-6B, 6D. In some cases, the library comprises a plurality of targets of Tables 4-6B, 6D, e.g., at least about 5, 10, 20, 50, 100, 150, 200, 250, or 300 of the targets listed in Tables 4-6B, 6D.

[0048] The library of gene modulatory reagents used in the functional analysis shown in FIG. 1 may be designed by selecting reagents that target the genes of the target library, e.g., the reagents target the genes encoding for one or more targets of Tables 4-6B, 6D, e.g., a target from Table 6D. Reagents may be selected that have been validated for efficacy in inhibiting the target, thus providing a more “compact” library. In an exemplary embodiment, the library comprises at least one nucleic acid comprising a sequence selected from SEQ ID NOS: 1-2789, 2980-3071. In some cases, the library comprises a plurality of nucleic acid sequences selected from SEQ ID NOS: 1-2789, 2980-3071. In an exemplary embodiment, the library comprises at least one nucleic acid comprising a sequence selected from SEQ ID NOS: 1526-2789. In some cases, the library comprises a plurality of nucleic acid sequences selected from SEQ ID NOS: 1526-2789. In an exemplary embodiment, the library comprises at least one nucleic acid comprising a sequence selected from SEQ ID NOS: 2980-3071. In some cases, the library comprises a plurality of nucleic acid sequences selected from SEQ ID NOS: 2980-3071. In some CRISPR-based methods, the library comprises a control gRNA sequence, e.g., a non-cutting control sequence that does not have a target in the human genome and/or a cutting sequence that targets a non-genetic region of the human genome. For example, the library may comprise one or more of the sequences of SEQ ID NOS: 2790-2971 (Table 6C). The library of reagents may be constructed in a format compatible with use in cells, e.g., primary (directly patient-derived) cancer cells. This step may involve the use of novel viral vector systems, the use of non-viral methods for reagent delivery to the cells, or the use of novel gene editing agents (e.g., non-Cas9 CRISPR nucleases), or any combination thereof

[0049] Accordingly, an exemplary method of the present disclosure may comprise one or more of the following steps: (1) Defining the full targeted pharmacologic landscape by generating a list of all targeted drugs for a disease or condition (drug library). (2) Determining the protein targets of these drugs, and the genes encoding those protein targets (genetic pharmacopeia). (3) Designing a library of gene modulatory reagents to target the genes encoding these proteins. (4) Constructing the library as well as any needed gene silencing/editing agents in a format compatible with use in cells, e.g., primary cancer cells. (5) Delivering the library and any needed gene silencing/editing agents into cells, e.g., primary, patient-derived cancer cells. (6) Propagating the edited cells. (7) Obtaining a readout of the effect of each perturbation, e.g., by next generation sequencing (NGS)-based methods. (8) Interpreting the resulting barcode distributions to determine the effect of individual perturbations on the viability of the patient's diseased cells. Although the methods have been exemplified with regard to personalized cancer treatment, these methods are also suitable for treatment of non-cancer based diseases or conditions.

[0050] A non-limiting exemplary generic flowchart for the identification of patient-specific tumor therapeutic vulnerabilities utilizing function genomics described herein is shown in FIG. 2. Patient-derived samples (201), either obtained directly from the patient or after passage in mice (PDX), are dissociated (202) and infected with a gRNA library corresponding to the desired therapeutic drug collection (203). Cells are viably maintained in vitro, for instance using 3D and/or organoid approaches, allowing gRNA which target essential tumor regulators to be gradually depleted from the population (“drop-out”) (204). Next-generation sequencing is performed to identify depleted barcodes corresponding to genes depleted from the population and encoding for patient-specific drug targets (205). Oncology drugs corresponding to the patient-specific drug targets are validated in vivo (206). As represented by the schematic in FIG. 3, this approach leverages the insight that the effect of each clinically used targeted oncology drug (302) can be modeled by CRISPR-mediated mutation of the corresponding gene encoding the drug target (301).

[0051] In the present description, certain specific details are set forth in order to provide a thorough understanding of various embodiments. However, one skilled in the art will understand that the embodiments provided may be practiced without these details. Unless the context requires otherwise, throughout the description and claims which follow, the word “comprise” and variations thereof, such as, “comprises” and “comprising,” are to be construed in an open, inclusive sense, that is, as “including, but not limited to.” As used in this description and the appended claims, the singular forms “a,” “an,” and “the” include plural referents unless the context clearly dictates otherwise. It should also be noted that the term “or” includes “and/or” unless the context clearly dictates otherwise. Further, headings provided herein are for convenience only and do not interpret the scope or meaning of the claimed embodiments.

[0052] The terms “homologous,” “homology,” or “percent homology” when used herein to describe to an amino acid sequence or a nucleic acid sequence, relative to a reference sequence, can be determined using the formula described by Karlin and Altschul (Proc. Natl. Acad. Sci. USA 87: 2264-2268, 1990, modified as in Proc. Natl. Acad. Sci. USA 90:5873-5877, 1993). Such a formula is incorporated into the basic local alignment search tool (BLAST) programs of Altschul et al. (J Mol Biol. 1990 Oct. 5; 215(3):403-10; Nucleic Acids Res. 1997 Sep. 1; 25(17):3389-402). Percent homology of sequences can be determined using the most recent version of BLAST, as of the filing date of this application. Percent identity of sequences can be determined using the most recent version of BLAST, as of the filing date of this application.

### Targeted Pharmacologic Landscape

[0053] In one aspect, provided herein is a pharmacologic landscape comprising a library of therapeutic agents having known protein targets, referred to as a drug library. The drug library may include low molecular weight drugs (e.g., having a molecule weight less than about 1 kDa) and biologic drugs (e.g., proteins such as antibodies). The drug library may comprise drugs suitable for a patient's particular disease or condition, such as cancer or an autoimmune disease. In various embodiments, the drug library includes FDA-approved therapeutic agents and as such may be expanded as new drugs are developed. The drug library may include all or nearly all of the targeted drugs treating a particular class of disease, e.g., the drug library includes at least about 50%, at least about 60%, at least about 70%, at least about 80%, at least about 90%, or 100% of known FDA-approved drugs for a particular disease class having a known protein target. Also provided herein are focused libraries for investigational therapies (e.g., those in Phase I-III clinical testing), and libraries of a particular target classes of interest (e.g., G-protein coupled receptors, kinases, etc.).

[0054] Drug Library for Cancer

[0055] In certain embodiments, a drug library is designed comprising two or more therapies shown to be efficacious for, and/or have received FDA approval for, treating cancer. In some embodiments, the drug library comprises at least 1, at least 2, at least 3, at least 4, at least 5, at least 6, at least 7, at least 8, at least 9, at least 10, at least 11, at least 12, at least 13, at least 14, at least 15, at least 16, at least 17, at least 18, at least 19, at least 20, at least 21, at least 22, at least 23, at least 24, at least 25, at least 30, at least 35, at least 40, at least 45, at least 50, at least 55, at least 60, at least 65, at least 70, at least 75, at least 80, at least 85, at least 90, at least 95, at least 100, at least 110, at least 120, at least 130, at least 140, at least 150, at least 160, at least 170, at least 180, at least 190, at least 200, at least 210, at least 220, at least 230, at least 240, at least 250, at least 260, at least 270, at least 280, at least 290, or at least 300 therapeutic agents. In some embodiments, the drug library comprises up to about 100, up to about 200, up to about 300, up to about 400, up to about 500, or up to about 1000 therapeutic agents. One or more of the therapeutic agents may be selected from Table 2. One or more of the therapeutic agents may be selected from Table 3.

[0056] In certain embodiments, a drug library is designed comprising two or more cancer therapeutics specific for a certain type of cancer. As non-limiting examples, the drug library comprises two or more cancer therapeutics shown to be efficacious for, and/or have received FDA approved for, melanoma, thyroid, colorectal, endometrial, lung, pancreatic, breast, genitourinary, gastrointestinal, ovarian, or head and neck cancer, or any cancer listed herein or known in the art. In some embodiments, the cancer-specific drug library comprises at least 1, at least 2, at least 3, at least 4, at least 5, at least 6, at least 7, at least 8, at least 9, or at least 10 therapeutic agents. In some embodiments, the cancer-specific drug library comprises up to about 10, 20, 30, 40, 50, 60, 70, 80, 90, or 100 therapeutic agents. One or more of the therapeutic agents may be selected from Table 2. One or more of the therapeutic agents may be selected from Table 3.

[0057] In certain embodiments, the drug library comprises at least one cancer therapeutic agent chosen from Table 2. The drug library may include at least 2, at least 3, at least 4, at least 5, at least 6, at least 7, at least 8, at least 9, at least 10, at least 15, at least 20, at least 25, at least 30, at least 35, at least 40, at least 45, at least 50, at least 60, at least 70, at least 80, at least 90, at least 100, at least 120, at least 140, at least 160, at least 180, at least 200, at least 250, at least 300, at least 350, at least 400, at least 450, at least 500, at least 600, at least 700, at least 800, or at least 900 therapeutic agents chosen from Table 2. The drug library may comprise the at least one cancer therapeutic agent chosen from Table 2, and one or more additional FDA-approved therapeutic agent(s) for cancer. The drug library may comprise at least about 50%, at least about 60%, at least about 70%, at least about 80%, at least about 90%, or 100% of known FDA-approved molecularly targeted cancer drugs. The drug library may comprise the at least one cancer therapeutic agent chosen from Table 2, and one or more additional therapeutic agent(s) for cancer that is undergoing FDA-approval and/or is the subject of any current or completed clinical trial.

[0058] In certain embodiments, the drug library comprises at least one cancer therapeutic agent chosen from Table 3. The drug library may include at least 2, at least 3, at least 4, at least 5, at least 6, at least 7, at least 8, at least 9, at least 10, at least 15, at least 20, at least 25, at least 30, at least 35, at least 40, at least 45, at least 50, at least 60, at least 70, at least 80, at least 90, at least 100, at least 120, at least 140, at least 160, at least 180, at least 200, at least 250, at least 300, at least 350, at least 400, at least 450, at least 500, at least 600, at least 700, at least 800, or at least 900 therapeutic agents chosen from Table 3. The drug library may comprise the at least one cancer therapeutic agent chosen from Table 3, and one or more additional FDA-approved therapeutic agent(s) for cancer. The drug library may comprise at least about 50%, at least about 60%, at least about 70%, at least about 80%, at least about 90%, or 100% of known FDA-approved molecularly targeted cancer drugs. The drug library may comprise the at least one cancer therapeutic agent chosen from Table 3, and one or more additional therapeutic agent(s) for cancer that is undergoing FDA-approval and/or is the subject of any current or completed clinical trial.

[0059] Gene Target Libraries

[0060] Further provided herein is a library of genetic targets comprising the genes encoding the proteins targeted by the therapeutic agents in the drug library. For therapeutic agents that are non-specific inhibitors, such as multi-kinase inhibitors, the targets may include multiple gene targets. The number of targeted genes must be significantly smaller than the “whole genome,” generating a compact library amenable to both in vitro and in vivo analysis. Non-limiting examples of targeted genes are shown in Table 4. Non-limiting examples of targeted genes for oncology are shown in Tables 5A-6B, 6D. The targeted genes described herein may comprise at least 1, at least 2, at least 3, at least 4, at least 5, at least 6, at least 7, at least 8, at least 9, at least 10, at least 11, at least 12, at least 13, at least 14, at least 15, at least 16, at least 17, at least 18, at least 19, at least 20, at least 21, at least 22, at least 23, at least 24, at least 25, at least 30, at least 35, at least 40, at least 45, at least 50, at least 55, at least 60, at least 65, at least 70, at least 75, at least 80, at least 85, at least 90, at least 95, at least 100, at least 110, at least 120, at least 130, at least 140, at least 150, at least 160, at least 170, at least 180, at least 190, at least 200, at least 210, at least 220, at least 230, at least 240, at least 250, at least 260, at least 270, at least 280, at least 290, or at least 300 genes from Table 5A. The targeted genes described herein may comprise at least 1, at least 2, at least 3, at least 4, at least 5, at least 6, at least 7, at least 8, at least 9, at least 10, at least 11, at least 12, at least 13, at least 14, at least 15, at least 16, at least 17, at least 18, at least 19, at least 20, at least 21, at least 22, at least 23, at least 24, at least 25, at least 30, at least 35, at least 40, at least 45, at least 50, at least 55, at least 60, at least 65, at least 70, at least 75, at least 80, at least 85, at least 90, at least 95, at least 100, at least 110, at least 120, at least 130, at least 140, at least 150, at least 160, at least 170, at least 180, at least 190, at least 200, at least 210, at least 220, at least 230, at least 240, at least 250, at least 260, at least 270, at least 280, at least 290, or at least 300 genes from Table 5B. The targeted genes described herein may comprise at least 1, at least 2, at least 3, at least 4, at least 5, at least 6, at least 7, at least 8, at least 9, at least 10, at least 11, at least 12, at least 13, at least 14, at least 15, at least 16, at least 17, at least 18, at least 19, at least 20, at least 21, at least 22, at least 23, at least 24, at least 25, at least 30, at least 35, at least 40, at least 45, at least 50, at least 55, at least 60, at least 65, at least 70, at least 75, at least 80, at least 85, at least 90, at least 95, at least 100, at least 110, at least 120, at least 130, at least 140, at least 150, at least 160, at least 170, at least 180, at least 190, at least 200, at least 210, at least 220, at least 230, at least 240, at least 250, at least 260, at least 270, at least 280, at least 290, or at least 300 genes from Table 5C. The targeted genes described herein may comprise at least 1, at least 2, at least 3, at least 4, at least 5, at least 6, at least 7, at least 8, at least 9, at least 10, at least 11, at least 12, at least 13, at least 14, at least 15, at least 16, at least 17, at least 18, at least 19, at least 20, at least 21, at least 22, or all of the genes from Table 5D. The targeted genes described herein may comprise at least 1, at least 2, at least 3, at least 4, at least 5, at least 6, at least 7, at least 8, at least 9, at least 10, at least 11, at least 12, at least 13, at least 14, at least 15, at least 16, at least 17, at least 18, at least 19, at least 20, at least 21, at least 22, at least 23, at least 24, at least 25, at least 30, at least 35, at least 40, at least 45, at least 50, at least 55, at least 60, at least 65, at least 70, at least 75, at least 80, at least 85, at least 90, at least 95, at least 100, at least 110, at least 120, at least 130, at least 140, at least 150, at least 160, at least 170, at least 180, at least 190, at least 200, at least 210, at least 220, at least 230, at least 240, at least 250, at least 260, at least 270, at least 280, at least 290, or at least 300 genes from Table 6A. The targeted genes described herein may comprise at least 1, at least 2, at least 3, at least 4, at least 5, at least 6, at least 7, at least 8, at least 9, at least 10, at least 11, at least 12, at least 13, at least 14, at least 15, at least 16, at least 17, at least 18, at least 19, at least 20, at least 21, at least 22, at least 23, at least 24, at least 25, at least 30, at least 35, at least 40, at least 45, at least 50, at least 55, at least 60, at least 65, at least 70, at least 75, at least 80, at least 85, at least 90, at least 95, at least 100, at least 110, at least 120, at least 130, at least 140, at least 150, at least 160, at least 170, at least 180, at least 190, at least 200, at least 210, at least 220, at least 230, at least 240, at least 250, at least 260, at least 270, at least 280, at least 290, or at least 300 genes from Table 6B. The targeted genes described herein may comprise at least 1, at least 2, at least 3, at least 4, at least 5, at least 6, at least 7, at least 8, at least 9, at least 10, at least 11, at least 12, at least 13, at least 14, at least 15, at least 16, at least 17, at least 18, at least 19, at least 20, at least 21, at least 22, or all of the genes from Table 6D. In some embodiments, the library comprises one or more genes to validate successful gene editing. A non-limiting example utilized in experiments described herein is the B2M gene.

[0061] A non-limiting exemplary gene target library was constructed as further described in the examples and characterized in FIG. 4 as targeting 316 unique genes. The genes targeted by the library include those listed in Table 5C. Accordingly, provided herein is a library targeting one or more of the genes of Table 5C, e.g., at least about 1, 2, 3, 4, 5, 6, 7, 8, 9, 10, 11, 12, 13, 14, 15, 20, 25, 30, 35, 40, 45, 50, 60, 70, 80, 90, 100, 120, 140, 160, 180, 200, 220, 240, 260, 280, 300, 310, or all of the genes of Table 5C.

[0062] Another non-limiting exemplary gene target library was constructed that targets 23 unique genes, as further described in the examples. The genes targeted by the library include those listed in Table 5D and B2M. Accordingly, provided herein is a library targeting one or more of the genes of Table 5D, e.g., at least about 1, 2, 3, 4, 5, 6, 7, 8, 9, 10, 11, 12, 13, 14, 15, 16, 17, 18, 19, 20, 21, 22, or all of the genes of Table 5D. In some cases the gene target library comprises a gene for validation purposes, such as B2M.

### Genetic Pharmacopeia

[0063] In one aspect, provided herein is a library of genetic elements which represent a collection of existing drugs for a particular disease or condition. These genetic elements are capable of modifying a patient's cells to mimic the effect of the existing drugs on the patient, allowing for personalized comprehensive functional profiling. The profiling may be performed in a pooled screening format to allow for screening of the effects of the modifications in parallel. Such highly parallel functional genomics methodology is utilized in preclinical biology, but has not been applicable to personalized therapeutic sensitivity profiling. Additionally, this approach enables comprehensive assessment of the impact of therapeutic manipulations in an in vivo testing paradigm, of critical importance for the reasons previously indicated herein.

[0064] Accordingly, disclosed herein are methods for the design, construction, and use of a genetic pharmacopeia comprising a plurality of gene modulatory reagents capable of modifying a patient's cells to knock out, or knock down, function of genes encoding for protein targets of a collection of existing drugs. In some embodiments, a genetic pharmacopeia is designed using publicly available tools, e.g., publicly available methods and reagents for gene editing or gene silencing. In some embodiments, a subset of these reagents will work poorly, most will be acceptable, and a minority will demonstrate exceptional performance. Pre-selection of reagents that have been validated to work well will be advantageous both with regard to efficiency of delivery and production of a more “compact” library, both of which reduce the number of patient-derived cells needed and increase the quality of data produced. In some embodiments, the design includes selection of the most efficacious or advantageous modulatory mechanism (e.g., CRISPR, RNAi). For CRISPR-based methods, the design comprises selection of the most advantageous RNA-guided endonuclease (e.g., Cas9 vs. Cas12a vs. Mad7). The design may also include selection of the most efficacious guide or seed sequences. The design may also include multiple gene modulatory reagents expressed from a single vector as a single or multiple transcriptional units. For instance, multiplexed gRNAs may be constructed for use with a Cas12 based nuclease (e.g., Cpfl) to generate a highly compact library. The design may also include elements in the library that allow for the identification, selection, or enrichment of transduced cells (e.g., fluorescent markers, antibiotic resistance cassettes, surface epitope expression cassettes).

[0065] The genetic pharmacopeia may be constructed in a format that is compatible with use in patient derived cells, e.g., primary cancer cells. In some embodiments, a viral delivery method is chosen for introduction of the gene modulatory reagent (e.g., guide or seed sequence). Non-limiting examples of viruses include lentivirus, adenovirus, adeno-associated virus, and other viruses disclosed herein. In some embodiments, a non-viral delivery method is selected. As a non-limiting example, the delivery method is transposase-mediated transposition. The library may be constructed using a combination of gene synthesis and pooled molecular cloning techniques. The library may be subject to quality control analysis to ensure full and approximately equal representation of the desired sequences. In some embodiments of a viral delivery method, pooled high-titer virus is prepared. In other embodiments, the virus is delivered in an array to facilitate an arrayed screening format.

[0066] Library of Gene Modulatory Reagents

[0067] In one aspect, provided herein are libraries comprising a plurality of gene modulatory reagents, each gene modulatory reagent capable of knocking down or knocking out the function of a gene that encodes a protein target from a library of protein targets. The plurality of gene modulatory reagents may be capable of knocking down or knocking out the function of at least about 50%, at least about 60%, at least about 70%, at least about 80%, at least about 90%, or at least about 95% of the genes that encode for the protein targets in the library. In some cases, the library of protein targets comprises all known proteins targeted by known drugs capable of treating a particular disease or condition. An exemplary disease or condition is cancer, e.g., a cancer disclosed herein or otherwise known in the art.

[0068] In some embodiments, the library of gene modulatory reagents is capable of knocking down or knocking out the function of one or more genes encoding protein targets selected from Table 5B. In some cases, the protein targets comprise at least 1, at least 2, at least 3, at least 4, at least 5, at least 10, or at least 20 protein targets of Table 5B. In some embodiments, the library of gene modulatory reagents is capable of knocking down or knocking out the function of one or more genes encoding protein targets selected from Table 5A. In some cases, the protein targets comprise at least 1, at least 2, at least 3, at least 4, at least 5, at least 10, or at least 20 protein targets of Table 5A. In some embodiments, the library of gene modulatory reagents is capable of knocking down or knocking out the function of one or more genes encoding protein targets selected from Table 5C. In some cases, the protein targets comprise at least 1, at least 2, at least 3, at least 4, at least 5, at least 10, or at least 20 protein targets of Table 5C. In some embodiments, the library of gene modulatory reagents is capable of knocking down or knocking out the function of one or more genes encoding protein targets selected from Table 5D. In some cases, the protein targets comprise at least 1, at least 2, at least 3, at least 4, at least 5, at least 10, or at least 20 protein targets of Table 5D. In some cases, the library of gene modulatory reagents is capable of knocking down or knocking out the function of one or more genes encoding for protein targets of one or more known drugs selected from Table 2-3. In some cases, the one or more known drugs comprises at least 1, at least 2, at least 3, at least 4, at least 5, at least 10, or at least 20 drugs of Table 2-3. In some cases, the library of gene modulatory reagents is capable of knocking down or knocking out the function of one or more genes encoding for protein targets of one or more known drugs selected from Table 2. In some cases, the one or more known drugs comprises at least 1, at least 2, at least 3, at least 4, at least 5, at least 10, or at least 20 drugs of Table 2. The plurality of gene modulatory reagents may be capable of knocking down or knocking out the function of about 10 to about 2,000, from about 10 to about 500, from about 10 to about 200, from about 10 to about 150, from about 50 to about 500, from about 50 to about 200, about 50 to about 2,000, or about 100 to about 2,000 genes. The library may comprise about 10 to about 2,000, from about 10 to about 500, from about 10 to about 200, from about 10 to about 150, from about 50 to about 500, from about 50 to about 200, about 50 to about 2,000, or about 100 to about 2,000 gene modulatory reagents.

[0069] At least one of the gene modulatory reagents may be capable of knocking out the function of a gene. For instance, the at least one gene modulatory reagent is part of a CRISPR-based gene editing system. In some cases, one or more of the plurality of gene modulatory reagents each comprise a gRNA sequence comprising at least about 90% homology or identity to a sequence selected from SEQ ID NOS: 1-2789, 2980-3071. In some cases, one or more of the plurality of gene modulatory reagents each comprise a gRNA sequence comprising at least about 90% homology or identity to a sequence selected from SEQ ID NOS: 1526-2789. In some cases, one or more of the plurality of gene modulatory reagents each comprise a gRNA sequence comprising at least about 90% homology or identity to a sequence selected from SEQ ID NOS: 2980-3071. In some cases, at least one of the gene modulatory reagents comprise a gRNA sequence having homology to at least a portion of the gene whose function is knocked out by the gene modulatory reagent. In some embodiments, the gene modulatory reagents comprise one or more control sequences. As a non-limiting example, the sequence is a gRNA control that does not have a target in the human genome. As another non-limiting example, the sequence is a gRNA control that targets a non-genetic region of the human genome. For instance, the library may comprise one or more of the sequences of SEQ ID NOS: 2790-2971 (Table 6C). The inclusion of targeting (e.g., CTRL-hg38 of Table 6C) and non-targeting (e.g., CTRL-non sequences of Table 6C) control gRNAs enables an estimate of the impact of dsDNA breaks in innocuous genome locations. In some embodiments, the gene modulatory reagents comprise a gRNA that targets a gene for validation of successful gene editing. For instance, as described in the examples and FIG. 7, gRNAs may be included that target the cell surface marker B2M at 6.25% of all gRNAs in the focused library (SEQ ID NOS: 2960-3071 and 2890-2905), enabling the validation of successful CRISPR editing in the population by flow cytometry.

[0070] At least one of the gene modulatory reagents may be capable of knocking down the function of a gene. For instance, the at least one gene modulatory reagent comprises an shRNA sequence having homology to at least a portion of the gene whose function is knocked down by the gene modulatory reagent. The homology may be at least about 90% sequence homology or identity. The at least a portion may be at least about 15 contiguous nucleotides.

[0071] Non-limiting exemplary libraries of gene modulatory reagents were prepared and characterized (FIG. 4). One library was constructed for CRISPR-based gene editing, targeting 316 unique genes, with 4 guide RNAs per target. The guide RNAs utilized are listed in Table 6B. The library also included the control guide RNAs of Table 6C. Another library of gene modulatory reagents was constructed for CRISPR-based gene editing, targeting 23 unique genes, with 4 guide RNAs per target. The guide RNAs utilized in the later library are listed in Table 6D. The library also included guide RNAs of Table 6C having SEQ ID NOS: 2890-2905 and 2960-2979. This later library has a smaller size, which enables screening to be performed with smaller cell numbers, such as with primary cancer cells.

[0072] In some embodiments, a library of gene modulatory reagents comprises one or more gene modulatory reagents that target a gene of Table 5D. In some embodiments, the library comprises one or more gene modulatory reagents that target at least 1, at least 2, at least 3, at least 4, at least 5, at least 6, at least 7, at least 8, at least 9, at least 10, at least 11, at least 12, at least 13, at least 14, at least 15, at least 16, at least 17, at least 18, at least 19, at least 20, at least 21, at least 22, or all of the gene targets of Table 5D. In some embodiments, the library comprises at least 1, at least 2, at least 3, at least 4, at least 5, at least 6, at least 7, at least 8, at least 9, at least 10, at least 11, at least 12, at least 13, at least 14, at least 15, at least 16, at least 17, at least 18, at least 19, at least 20, at least 21, at least 22, at least 23, at least 24, at least 25, at least 30, at least 35, at least 40, at least 45, at least 50, at least 55, at least 60, at least 65, at least 70, at least 75, at least 80, at least 85, at least 90, or all of the gRNA of Table 6D.

[0073] In some embodiments, one or more of the gene modulatory reagents is designed to knock out or knock down the function of a positive control gene, such as a core essential gene for the cell. Such reagents may serve as a positive control for library functionality. In some embodiments, one or more of the gene modulatory reagents is designed to knock out or knock down the function of a non-targeting gene and/or a targeting and non-genic gene. Such gene modulatory reagents may serve as negative controls. Non-limiting control gene modulatory reagents are provided in Table 6C.

[0074] In some embodiments, one or more of the gene modulatory reagents is positioned within a vector. The vector may comprise an adapter sequence. The adapter sequence may comprise a type IIS restriction enzyme cleavage site, which may allow for GoldenGate assembly cloning. The adapter sequence may comprise homology arms compatible with a destination vector allowing for cloning by overhang homology based methods, such as Gibson assembly. The vector may also comprise genetic elements of a virus. Non-limiting examples of viruses include adenovirus, retrovirus, adeno-associated virus (AAV), pox virus, parvovirus, baculovirus, measles virus, herpes simplex virus (HSV), Moloney Murine Leukemia Virus (MoMLV, MMLV, MuLV, or MLV), Murine Stem cell Virus (MSCV), and human immunodeficiency virus (HIV). The vector may also comprise a sequence encoding a marker, an antibiotic resistance cassette, or surface epitope expression cassette, or a combination thereof. The marker may be a fluorescent marker.

[0075] CRISPR

[0076] In one aspect, provided is a library comprising a plurality of gene modulatory reagents, wherein each modulatory reagent comprises a guide RNA (gRNA) homologous to a target gene. The target gene may encode for a protein targeted by a known therapeutic agent (e.g., a therapeutic agent from Tables 2-3). Non-limiting examples of target genes are listed in Tables 4-6B, 6D. In some embodiments, one or more of the gRNAs comprise a sequence at least about 85%, 90%, 95%, or 100% homologous to at least about 10, 15, or 20 contiguous nucleobases of a target gene. In some embodiments, one or more of the gRNAs comprise a sequence at least about 85%, 90%, 95%, or 100% homologous to at least about 10, 15, or 20 contiguous nucleobases of a target gene chosen from Tables 4-6B, 6D. In some embodiments, the library comprises one or a plurality of sequences selected from SEQ ID NOS: 1-2789, 2980-3071. In some embodiments, the library comprises one or a plurality of sequences having at least about 85%, 90%, 95%, or 100% homology to a sequence selected from SEQ ID NOS: 1-2789, 2980-3071. In some embodiments, the library comprises one or a plurality of sequences selected from SEQ ID NOS: 1526-2789. In some embodiments, the library comprises one or a plurality of sequences having at least about 85%, 90%, 95%, or 100% homology to a sequence selected from SEQ ID NOS: 1526-2789. In some embodiments, the library comprises one or a plurality of sequences selected from SEQ ID NOS: 2790-2959. In some embodiments, the library comprises one or a plurality of sequences having at least about 85%, 90%, 95%, or 100% homology to a sequence selected from SEQ ID NOS: 2790-2959. In some embodiments, the library comprises one or a plurality of sequences selected from SEQ ID NOS: 1526-2790. In some embodiments, the library comprises one or a plurality of sequences having at least about 85%, 90%, 95%, or 100% homology to a sequence selected from SEQ ID NOS: 1526-2790. In some embodiments, the library comprises one or a plurality of sequences selected from SEQ ID NOS: 2980-3071. In some embodiments, the library comprises one or a plurality of sequences having at least about 85%, 90%, 95%, or 100% homology to a sequence selected from SEQ ID NOS: 2980-3071. The library may comprise from about 10 to about 2,000, from about 10 to about 500, from about 10 to about 200, from about 10 to about 150, from about 50 to about 500, from about 50 to about 200, from about 50 to about 2,000, from about 100 to about 2,000, from about 200 to about 2,000, or from about 500 to about 2,000 different gRNA sequences. In some embodiments, one or more of the gRNA sequences is encoded on a vector.

[0077] In some embodiments, the library further comprises an RNA-guided endonuclease such as Cas9, Cas12, Cas12a (or Cpfl or Mad7), Cas12b (or C2c1 or Cpf2), Cas12c (C2c3), Cas12d (or CasY), Cas12e (or CasX), Cas13, Cas13a (or C2c2), Cas13b (or C2c6), Cas13c (or C2c7), Cas13d (or Casrx), Cas14, Cas14a, Cas14b, Cas14c, Cas1, Cas1B, Cas2, Cas3, Cas4, Cas5, Cas5e (CasD), Cash, Cas6e, Cas6f, Cas7, Cas8a, Cas8al, Cas8a2, Cas8b, Cas8c, Csnl, Csx12, Cas10, Cas10d, Cas10, Cas10d, CasF, CasG, CasH, Csy1, Csy2, Csy3, Csel (CasA), Cse2 (CasB), Cse3 (CasE), Cse4 (CasC), Csc1, Csc2, Csa5, Csn2, Csm2, Csm3, Csm4, Csm5, Csm6, Cmr1, Cmr3, Cmr4, Cmr5, Cmr6, Csb1, Csb2, Csb3, Csx17, Csx14, Csx10, Csx16, CsaX, Csx3, Csx1, Csx15, Csf1, Csf2, Csf3, Csf4, or Cul966, or derivative thereof, variant thereof, fragment thereof, or any combination thereof. In some embodiments, the endonuclease is of the Cas9 or Cas12a family, which may include, but is not limited to, S. pyogenes Cas9 (SpCas9), SpCas9 D1135E variant, SpCas9 VRER variant, SpCas9 EQR variant, xCas9, SpCas9-NG, S. aureus Cas9 (SaCas9), Acidaminococcus sp. (AsCpfl), Lachnospiraceae bacterium (LbCpfl), AsCpfl RR variant, LbCpfl RR variant, AsCpfl RVR variant, C. jejuni Cas9 (Cj Cas9), N. meningitidis (NmCas9), S. thermophilus (StCas9), T. denticola (TdCas9), and Mad7. Additionally, other RNA-guided endonucleases that are suitable for the library disclosed herein include zinc finger nucleases (ZFN), transcription activator-like effector nucleases (TALEN), meganucleases, RNA-binding proteins (RBP), recombinases, flippases, transposases, Argonaute (Ago) proteins (e.g., prokaryotic Argonaute (pAgo), archaeal Argonaute (aAgo), and eukaryotic Argonaute (eAgo)), and any functional fragment thereof, and any combination thereof.

[0078] In some cases, the gRNA and/or endonuclease is encoded on a vector. In some cases, a vector comprising gRNA and/or endonuclease comprises one or more features of a viral genome. As a non-limiting example, the viral vector includes retroviral vector, adenoviral vector, adeno-associated viral vector (AAV), pox vectors, parvoviral vectors, baculovirus vectors, measles viral vectors, or herpes simplex virus vector (HSV). In some instances, the retroviral vector includes gamma-retroviral vector, such as a vector derived from the Moloney Murine Leukemia Virus (MoMLV, MMLV, MuLV, or MLV) or the Murine Stem cell Virus (MSCV) genome. In some instances, the retroviral vector comprises lentiviral vectors such as those derived from the human immunodeficiency virus (HIV) genome. In some instances, AAV vector comprises AAV1, AAV2, AAV4, AAV5, AAV6, AAV7, AAV8, or AAV9 serotype. In some instances, the viral vector is a chimeric viral vector, comprising viral portions from two or more viruses. In additional instances, the viral vector is a recombinant viral vector.

[0079] In some embodiments, the vector comprises a marker for selection, e.g., an antibiotic resistance cassette or surface epitope expression cassette. In some embodiments, the gene modulatory reagent and endonuclease are encoded by separate vectors. As a non-limiting example, the endonuclease is delivered via adenovirus, while the gRNA is delivered by lentivirus. In some embodiments, the endonuclease coding sequence may be split between two vectors. For instance, this method may be employed when constructing large endonucleases such as Cas9. In some embodiments, the gene modulatory reagent is encoded by a viral vector and the endonuclease is provided as a ribonuclear protein complex transfected into target cells, for instance using lipid or electroporation techniques.

[0080] RNAi

[0081] In one aspect, provided is a library comprising a plurality of gene modulatory reagents, wherein one or more of the modulatory reagents comprise a short hairpin RNA (shRNA) complementary to a target mRNA of a protein targeted by a known therapeutic agent (e.g., a therapeutic agent chosen from Tables 2-3). Non-limiting examples of target proteins include those encoded by the genes listed in Tables 4-6B, 6D. In some embodiments, one or more of the shRNA each comprise a sequence at least about 85%, 90%, 95%, or 100% complementary to at least about 10, 15, or 20 contiguous nucleobases of a target mRNA. In some embodiments, one or more of the shRNA each comprise a sequence at least about 85%, 90%, 95%, or 100% complementary to at least about 10, 15, or 20 contiguous nucleobases of a target mRNA encoding for a protein selected from Tables 4-6B, 6D. The library may comprise from about 10 to about 2,000, from about 50 to about 2,000, from about 10 to about 500, from about 10 to about 200, from about 10 to about 150, from about 50 to about 500, from about 50 to about 200, from about 50 to about 2,000, from about 100 to about 2,000, or from about 500 to about 2,000 different shRNA sequences.

### Genetic Modification and Cell Propagation

[0082] In some aspects of the disclosure, a library comprising a plurality of gene modulatory reagents is delivered to a sample of cells from a subject having a disease or condition to generate a plurality of modified cells. In exemplary embodiments, the subject has cancer and the sample of cells comprise primary cancer cells. For some embodiments involving cancer cells, tumor samples are processed in a manner that preserves cancer cell viability, while maximizing cellular yield. Non-limiting examples of delivery methods include viral methods (e.g., lentivirus, adenovirus, or adeno-associated virus) as well as non-viral methods (e.g., transposase-mediated transposition employing transposons such as piggybac or sleeping beauty, or integrases such as phi31). In some embodiments, delivery of viral particles to the cells is performed in a manner that ensures equal and adequate representation of clones, while minimizing multiplicity of infection. In particular, the number of times each clone is presented within the population (“representation”) may be a crucial factor which determines the power of the eventual analysis to sensitively and specifically detect changes in barcode abundance following in vitro or in in vivo propagation.

[0083] Methods of Genetic Modification

[0084] An exemplary method for generating a plurality of modified cancer cells from a subject comprises: delivering a library of gene modulatory reagents to a sample of cancer cells from the subject to generate the plurality of modified cancer cells, wherein each modified cancer cell harbors one or more of the gene modulatory reagents, and each gene modulatory reagent is capable of knocking down or knocking out the function of a gene that encodes a protein target from a library of protein targets.

[0085] In some embodiments, the method for generating the plurality of modified cancer cells comprises a CRISPR/endonuclease-based gene editing system. For instance, one or more of the gene modulatory reagents comprises a gRNA sequence comprising homology to at least a portion of the gene whose function is knocked out in the modified cancer cell. The gRNA may comprise homology to about 10 to about 50 contiguous nucleotides of the gene. The homology may be at least about 90% sequence homology or identity. In some embodiments, one or more of the gene modulatory reagents each comprise a gRNA sequence comprising at least about 90% homology or identity to a sequence selected from SEQ ID NOS: 1-2789, 2980-3071. In some embodiments, one or more of the gene modulatory reagents each comprise a gRNA sequence comprising at least about 90% homology or identity to a sequence selected from SEQ ID NOS: 1526-2789. In some embodiments, one or more of the gene modulatory reagents each comprise a gRNA sequence comprising at least about 90% homology or identity to a sequence selected from SEQ ID NOS: 2790-2959. In some embodiments, one or more of the gene modulatory reagents each comprise a gRNA sequence comprising at least about 90% homology or identity to a sequence selected from SEQ ID NOS: 2980-3071. The gRNA may be positioned within a vector, e.g., for viral delivery as discussed herein.

[0086] The method for generating modified cancer cells may further comprise contacting the cancer cells with an endonuclease. The endonuclease may comprise a Cas9 or Cas12a endonuclease. Non-limiting examples of Cas9 or Cas12a endonucleases include S. pyogenes Cas9 (SpCas9), SpCas9 D1135E variant, SpCas9 VRER variant, SpCas9 EQR variant, xCas9, SpCas9-NG, S. aureus Cas9 (SaCas9), Acidaminococcus sp. (AsCpfl), Lachnospiraceae bacterium (LbCpfl), AsCpfl RR variant, LbCpfl RR variant, AsCpfl RVR variant, C. jejuni Cas9 (CjCas9), N. meningitidis (NmCas9), S. thermophilus (StCas9), T. denticola (TdCas9), and Mad7. In some cases, the endonuclease does not comprise a Cas9 or Cas12a endonuclease.

[0087] In some embodiments, the method for generating the plurality of modified cancer cells comprises an RNA interference (RNAi) gene silencing system. For instance, each gene modulatory reagent comprises a shRNA sequence targeting mRNA encoding for a protein target from the library of protein targets. The shRNA may have homology to about 10 to about 50 contiguous nucleotides of the gene. The homology may be at least about 90% sequence homology or identity. The shRNA may be positioned within a vector, e.g., for viral delivery as discussed herein.

[0088] In some embodiments, the library of gene modulatory reagents comprises from about 10 to about 2,000, from about 10 to about 500, from about 10 to about 200, from about 10 to about 150, from about 50 to about 500, from about 50 to about 200, from about 50 to about 2,000, from about 100 to about 2,000, or from about 500 to about 2,000 different gene modulatory reagents. In some cases, at least about 90% of the gene modulatory reagents are present in the library in a quantity within about 10% of the average gene modulatory reagent quantity.

[0089] In some embodiments, the library of protein targets comprises at least 1, at least 2, at least 3, at least 4, at least 5, at least 10, or at least 20 protein targets of Table 5B. In some embodiments, the library of protein targets comprises at least 1, at least 2, at least 3, at least 4, at least 5, at least 10, or at least 20 protein targets of Table 5A. In some embodiments, the library of protein targets comprises at least 1, at least 2, at least 3, at least 4, at least 5, at least 10, or at least 20 protein targets of Table 5C. In some embodiments, the library of protein targets comprises at least 1, at least 2, at least 3, at least 4, at least 5, at least 10, or at least 20 protein targets of Table 5D.

[0090] In some embodiments, the sample of cancer cells comprises primary cancer cells. The sample of cancer cells may comprise about 10⁵ to about 10⁸ cells. The sample of cancer cells may have been processed to preserve cell viability. The method may thus further comprise preparing the sample of cancer cells to preserve cell viability prior to and/or after delivery of the library of gene modulatory reagents. The method may also further comprise propagating the modified cancer cells. Propagation may comprise maintenance of the modified cancer cells in a 2D in vitro culture. Propagation may comprise maintenance of the modified cancer cells in a 3D in vitro culture. Propagation may comprise maintenance of the modified cancer cells in vivo. In some cases, propagation occurs within an animal model, e.g., in a rodent.

[0091] CRISPR Gene Editing

[0092] In some embodiments, a sample of cells is modified using a CRISPR-based gene editing method. The gene editing method may comprise contacting the sample of cells with a plurality of gRNA sequences, wherein one or more of the gRNAs have sequence homology to a target gene encoding a protein targeted by a therapeutic agent. Non-limiting examples of target genes are provided in Tables 4-6B, 6D. Non-limiting examples of therapeutic agents are provided in Tables 2-3. In some embodiments, the sample of cells is contacted with at least one or a plurality of gRNA sequences chosen from SEQ ID NOS: 1-2789, 2980-3071. In some embodiments, the sample of cells is contacted with at least one or a plurality of gRNA sequences, each having at least about 85% homology to a sequence chosen from SEQ ID NOS: 1-2789, 2980-3071. In some embodiments, the sample of cells is contacted with at least one or a plurality of gRNA sequences chosen from SEQ ID NOS: 2980-3071. In some embodiments, the sample of cells is contacted with at least one or a plurality of gRNA sequences, each having at least about 85% homology to a sequence chosen from SEQ ID NOS: 2980-3071. In some embodiments, the sample of cells is contacted with at least one or a plurality of gRNA sequences chosen from SEQ ID NOS: 1526-2789. In some embodiments, the sample of cells is contacted with at least one or a plurality of gRNA sequences, each having at least about 85% homology to a sequence chosen from SEQ ID NOS: 1526-2789. In some embodiments, the sample of cells is contacted with at least one or a plurality of gRNA sequences chosen from SEQ ID NOS: 1526-2959. In some embodiments, the sample of cells is contacted with at least one or a plurality of gRNA sequences, each having at least about 85% homology to a sequence chosen from SEQ ID NOS: 1526-2959. In some embodiments, the sample of cells is contacted with at least one or a plurality of gRNA sequences chosen from SEQ ID NOS: 2790-2959. In some embodiments, the sample of cells is contacted with at least one or a plurality of gRNA sequences, each having at least about 85% homology to a sequence chosen from SEQ ID NOS: 2790-2959. The sample of cells is also contacted with an RNA-guided endonuclease, e.g., Cas9, Cas12, Cas12a (or Cpfl or Mad7), Cas12b (or C2c1 or Cpf2), Cas12c (C2c3), Cas12d (or CasY), Cas12e (or CasX), Cas13, Cas13a (or C2c2), Cas13b (or C2c6), Cas13c (or C2c7), Cas13d (or Casrx), Cas14, Cas14a, Cas14b, Cas14c, Cas1, Cas1B, Cas2, Cas3, Cas4, Cas5, Cas5e (CasD), Cash, Cas6e, Cas6f, Cas7, Cas8a, Cas8a1, Cas8a2, Cas8b, Cas8c, Csn1, Csx12, Cas10, Cas10d, Cas10, Cas10d, CasF, CasG, CasH, Csy1, Csy2, Csy3, Cse1 (CasA), Cse2 (CasB), Cse3 (CasE), Cse4 (CasC), Csc1, Csc2, Csa5, Csn2, Csm2, Csm3, Csm4, Csm5, Csm6, Cmrl , Cmr3, Cmr4, Cmr5, Cmr6, Csbl, Csb2, Csb3, Csx17, Csx14, Csx10, Csx16, CsaX, Csx3, Csxl, Csx15, Csf1, Csf2, Csf3, Csf4, Cul966, zinc finger nucleases (ZFN), transcription activator-like effector nucleases (TALEN), meganucleases, RNA-binding proteins (RBP), recombinases, flippases, transposases, Argonaute (Ago) proteins (e.g., prokaryotic Argonaute (pAgo), archaeal Argonaute (aAgo), or eukaryotic Argonaute (eAgo)), or derivative thereof, variant thereof, fragment thereof, or combination thereof.

[0093] RNAi

[0094] In some embodiments, a sample of cells is modified using an RNAi method. In some embodiments, the sample of cells is contacted with a plurality of shRNA sequences, each shRNA sequence complementary to a target mRNA of a protein targeted by a therapeutic agent. Non-limiting examples of target proteins include those encoded by the genes listed in Tables 4-6B, 6D. Non-limiting examples of therapeutic agents are provided in Tables 2-3.

[0095] Compilation of Modified Cancer Cells

[0096] Further provided herein are compilations of modified cancer cells. An exemplary compilation comprises a plurality of modified cancer cells, wherein each modified cancer cell harbors one or more gene modulatory reagents, and each gene modulatory reagent is capable of knocking down or knocking out the function of a gene that encodes a protein target from a library of protein targets. In some embodiments, the library of protein targets comprises at least 1, at least 2, at least 3, at least 4, at least 5, at least 10, or at least 20 protein targets of Table 5B. In some embodiments, the library of protein targets comprises at least 1, at least 2, at least 3, at least 4, at least 5, at least 10, or at least 20 protein targets of Table 5C. In some embodiments, the library of protein targets comprises at least 1, at least 2, at least 3, at least 4, at least 5, at least 10, or at least 20 protein targets of Table 5D. In some embodiments, the library of protein targets comprises at least 1, at least 2, at least 3, at least 4, at least 5, at least 10, or at least 20 protein targets of Table 5A. In some embodiments, the library of protein targets comprises at least 1, at least 2, at least 3, at least 4, at least 5, at least 10, or at least 20 protein targets of Table 3. In some embodiments, the library of protein targets comprises at least 1, at least 2, at least 3, at least 4, at least 5, at least 10, or at least 20 protein targets of Table 4. In some embodiments, the modified cancer cells are modified primary cancer cells. The modified cancer cells may comprise from about 10 to about 2,000, from about 50 to about 2,000, from about 10 to about 500, from about 10 to about 200, from about 10 to about 150, from about 50 to about 500, from about 50 to about 200, from about 100 to about 2,000, or from about 500 to about 2,000 different populations of modified cancer cells.

[0097] The modified cancer cells may comprise from about 10 to about 2,000, from about 10 to about 500, from about 10 to about 200, from about 10 to about 150, from about 50 to about 500, from about 50 to about 200, from about 50 to about 2,000, from about 100 to about 2,000, or from about 500 to about 2,000 different gene modulatory reagents. At least one of the one or more gene modulatory reagents may comprise a sequence selected from SEQ ID NOS: 1-2789, 2980-3071. At least one of the one or more of gene modulatory reagents may comprise a sequence at least about 90% homologous or identical to a sequence selected from SEQ ID NOS: 1-2789, 2980-3071. At least one of the one or more gene modulatory reagents may comprise a sequence selected from SEQ ID NOS: 2980-3071. At least one of the one or more of gene modulatory reagents may comprise a sequence at least about 90% homologous or identical to a sequence selected from SEQ ID NOS: 2980-3071. At least one of the one or more gene modulatory reagents may comprise a sequence selected from SEQ ID NOS: 1526-2789. At least one of the one or more of gene modulatory reagents may comprise a sequence at least about 90% homologous or identical to a sequence selected from SEQ ID NOS: 1526-2789. At least one of the one or more gene modulatory reagents may comprise a sequence selected from SEQ ID NOS: 1526-2959. At least one of the one or more of gene modulatory reagents may comprise a sequence at least about 90% homologous or identical to a sequence selected from SEQ ID NOS: 1526-2959. At least one of the one or more gene modulatory reagents may comprise a sequence selected from SEQ ID NOS: 2790-2959. At least one of the one or more of gene modulatory reagents may comprise a sequence at least about 90% homologous or identical to a sequence selected from SEQ ID NOS: 2790-2959.

[0098] The modified cancer cells may have been modified by gene editing using a CRISPR-based method. As such, the gene modulatory reagents harbored by the modified cancer cells may comprise a gRNA sequence comprising homology to at least a portion of the gene whose function is knocked down or knocked out in the modified cancer cell. In some cases, the gRNA comprises homology to about 10 to about 50 contiguous nucleotides of the gene. The homology may be at least about 90% sequence homology or identity. The shRNA may be positioned within a vector, e.g., for viral delivery as discussed herein.

[0099] The modified cancer cells may also comprise an endonuclease, for instance, where the cells are modified using a gene editing system such as CRISPR. The endonuclease may comprise a Cas9 or Cas12a endonuclease. Non-limiting examples of Cas9 or Cas12a endonuclease include S. pyogenes Cas9 (SpCas9), SpCas9 D1135E variant, SpCas9 VRER variant, SpCas9 EQR variant, xCas9, SpCas9-NG, S. aureus Cas9 (SaCas9), Acidaminococcus sp. (AsCpfl), Lachnospiraceae bacterium (LbCpfl), AsCpfl RR variant, LbCpfl RR variant, AsCpfl RVR variant, C. jejuni Cas9 (CjCas9), N. meningitidis (NmCas9), S. thermophilus (StCas9), T. denticola (TdCas9), and Mad7. The endonuclease may not comprise a Cas9 or Cas12a endonuclease.

[0100] The modified cancer cells may have been modified by gene silencing using shRNA gene modulatory reagents. Therefore, one or more of the gene modulatory reagents may comprise an shRNA sequence comprising homology to at least a portion of the gene whose function is knocked down in the modified cancer cell. The shRNA may comprise homology to about 10 to about 50 contiguous nucleotides of the gene. The homology may be at least about 90% sequence homology or identity. The shRNA may be positioned within a vector, e.g., for viral delivery as discussed herein.

[0101] Cell Propagation

[0102] In one aspect, provided herein are methods of propagating the plurality of genetically modified cells. For example, the genetically modified cells are modified using a CRISPR gene editing system or RNAi as described herein. The cells may be modified from primary cancer cells. In some embodiments, the plurality of modified cells is propagated in 2D format in vitro, 3D format in vitro, or in vivo. Non-limiting examples of the 3D in vitro format could include propagating cells embedded in sponge matrices (e.g., collagen-based), scaffolds, extracellular matrix (ECM) conditions such as basement membrane extract or Matrigel, in suspension, in organoid culture, or in microfluidic platforms. Exemplary materials constituting 3D in vitro format for cell propagation include collagen, gelatin, elastin, fibronectin, laminin, vitronectin, poly-lysine, poly-L-ornithine, silicone, polysaccharide polymers such as alginate, agar, dextran, carrageenan, chitosan, pectin, cellulose, gellan gum, xanthan gum, pullulan, glycosaminoglycan and any fragmented or derivative forms, hyaluronic acid, heparan, heparin, dermatan, chondroitin, or any hydrogel or biocompatible polymer. For in vitro approaches with cancer cells, the cancer cells are maintained under conditions that both support bulk cell survival while allowing selective pressure from induced mutations. For in vivo approaches, a propagation technique is selected which maximizes engraftment efficiency and survival. In some embodiments, in vivo cell propagation can include patient derived xenograft via either heterotopic implantation or orthotopic implantation. Additionally, for in vivo approaches, modified cancer cells may be implanted orthotopically (e.g., within the pancreas, for a pancreatic-origin tumor) or ectopically (e.g., subcutaneously, for a pancreatic origin tumor).

### Screening Methods

[0103] In one aspect, provided are methods of evaluating a sample of cells for the presence, absence, and/or quantity of a nucleic acid sequence from the genetic pharmacopeia. The power of the genetic pharmacopeia becomes evident in the ability to read out effects on cell growth directly via ‘barcode’ counting of modified cells (e.g., transduced cancer cells). Cells harboring a gRNA or shRNA impairing cell viability will be less represented in the overall population (i.e. will ‘dropout’); this manifests as less frequent appearance of the gRNA/shRNA sequence itself within the overall population of guide/shRNA sequences. The method may employ next-generation sequencing (NGS), which is well-established, cost effective, commercial scale, robust, highly quantitative, and highly amenable to multiplexed analysis.

[0104] Sequencing can be performed with any appropriate sequencing technology, including but not limited to, single-molecule real-time (SMRT) sequencing, Polony sequencing, sequencing by ligation, reversible terminator sequencing, proton detection sequencing, ion semiconductor sequencing, nanopore sequencing, electronic sequencing, pyrosequencing, Maxam-Gilbert sequencing, chain termination (e.g., Sanger) sequencing, +S sequencing, or sequencing by synthesis. Sequencing methods also include next-generation sequencing, e.g., modern sequencing technologies such as Illumina sequencing (e.g., Solexa), Roche 454 sequencing, Ion torrent sequencing, and SOLiD sequencing. In some cases, next-generation sequencing involves high-throughput sequencing methods. Additional sequencing methods available to one of skill in the art may also be employed.

[0105] The resulting barcode distributions are interpreted to determine the effect of individual perturbations on the viability of a subject's cells. In some implementations, raw sequencing read counts are interpreted and remapped back into ‘drug space’. For instance, in the hypothetical case described above, if a particular gRNA was found to be less prevalent than expected within the population, this would suggest that the protein encoded by the gene target of the gRNA is required for the survival or proliferation of the patient's cancer cells. As such, the drug targeting that protein (identified in step 1 above) is suggested to be a potentially higher value therapeutic for the patient.

[0106] An exemplary method of evaluating the functional effect of genetically modifying cancer cells from a subject comprises: sequencing a plurality of modified cancer cells, wherein each modified cancer cell harbors one or more gene modulatory reagents, each gene modulatory reagent capable of knocking down or knocking out the function of a gene that encodes a protein target in a library of protein targets; and wherein a gene modulatory reagent that impairs cell viability will have fewer sequence reads than a gene modulatory reagent that does not impair cell viability. The method may further comprise determining which gene modulatory regents have fewer than a threshold number of sequence reads. The threshold number of sequence reads may be an expected number of sequence reads if the gene modulatory reagent did not impair cell viability. In some cases the threshold number of sequence reads is an average number of sequence reads for each gene modulatory reagent in the plurality of modified cancer cells. In some embodiments, the method further comprises correlating each gene modulatory reagent that has fewer than the threshold number of sequence reads to its corresponding protein target in the library of protein targets. The method may then also comprise correlating the corresponding protein target to a therapeutic molecule. The library of protein targets may comprise at least 1, at least 2, at least 3, at least 4, at least 5, at least 10, or at least 20 protein targets of Table 5B. The library of protein targets may comprise at least 1, at least 2, at least 3, at least 4, at least 5, at least 10, or at least 20 protein targets of Table 5C. The library of protein targets may comprise at least 1, at least 2, at least 3, at least 4, at least 5, at least 10, or at least 20 protein targets of Table 5D. The library of protein targets may comprise at least 1, at least 2, at least 3, at least 4, at least 5, at least 10, or at least 20 protein targets of Table 5A. The library of protein targets may comprise at least 1, at least 2, at least 3, at least 4, at least 5, at least 10, or at least 20 protein targets of Table 3. The library of protein targets may comprise at least 1, at least 2, at least 3, at least 4, at least 5, at least 10, or at least 20 protein targets of Table 4. At least one of the one or more of the gene modulatory reagents may comprise a gRNA sequence comprising at least about 90% homology or identity to a sequence selected from SEQ ID NOS: 1-2789, 2980-3071. At least one of the one or more of the gene modulatory reagents may comprise a gRNA sequence comprising at least about 90% homology or identity to a sequence selected from SEQ ID NOS: 2980-3071. At least one of the one or more of the gene modulatory reagents may comprise a gRNA sequence comprising at least about 90% homology or identity to a sequence selected from SEQ ID NOS: 1526-2789.

### Methods of Treatment

[0107] Further provided herein are methods of treating a subject having a disease or condition, wherein the subject has been determined to be susceptible to a therapeutic agent using a method described herein. In some cases, the disease or condition is cancer. Non-limiting examples of cancer include acute lymphoblastic leukemia (ALL), acute myeloid leukemia (AML), adrenocortical carcinoma, AIDS-related cancers, Kaposi sarcoma, AIDS-related lymphoma, primary CNS lymphoma, anal cancer, appendix cancer, astrocytomas, atypical teratoid/rhabdoid tumor, central nervous system cancers, basal cell carcinoma of the skin, bile duct cancer, bladder cancer, bone cancer, brain tumors, breast cancer, bronchial tumors, Burkitt lymphoma, carcinoid tumor, cardiac tumors, central nervous system cancers, embryonal tumors, germ cell tumor, primary CNS lymphoma, cervical cancer, cholangiocarcinoma, chordoma, chronic lymphocytic leukemia (CLL), chronic myelogenous leukemia (CML), chronic myeloproliferative neoplasms, colorectal cancer, craniopharyngioma, cutaneous t-cell lymphoma, ductal carcinoma in situ (DCIS), embryonal tumors, central nervous system cancer, endometrial cancer, ependymoma, esophageal cancer, esthesioneuroblastoma, Ewing sarcoma, extracranial germ cell tumor, extragonadal germ cell tumor, eye cancer, intraocular melanoma, retinoblastoma, fallopian tube cancer, fibrous histiocytoma of bone, osteosarcoma, gallbladder cancer, gastric cancer, gastrointestinal carcinoid tumor, gastrointestinal stromal tumors (GIST), testicular cancer, gestational trophoblastic disease, hairy cell leukemia, head and neck cancer, heart tumors, hepatocellular cancer, Hodgkin lymphoma, hypopharyngeal cancer, intraocular melanoma, islet cell tumors, pancreatic neuroendocrine tumors, kidney cancer, Langerhans cell histiocytosis, laryngeal cancer, leukemia, lip and oral cavity cancer, liver cancer, lung cancer (non-small cell and small cell), lymphoma, male breast cancer, malignant fibrous histiocytoma of bone and osteosarcoma, melanoma, intraocular melanoma, Merkel cell carcinoma, mesothelioma, metastatic cancer, metastatic squamous neck cancer with occult primary, midline tract carcinoma with NUT gene changes, mouth cancer, multiple endocrine neoplasia syndromes, multiple myeloma/plasma cell neoplasms, mycosis fungoides, myelodysplastic syndromes, myelodysplastic/myeloproliferative neoplasms, myelogenous leukemia, chronic (CML), myeloid leukemia, acute (AML), nasal cavity and paranasal sinus cancer, nasopharyngeal cancer, neuroblastoma, non-Hodgkin lymphoma, non-small cell lung cancer, oral cancer, oropharyngeal cancer, ovarian cancer, pancreatic cancer, pancreatic neuroendocrine tumors (islet cell tumors), papillomatosis, paraganglioma, paranasal sinus and nasal cavity cancer, parathyroid cancer, penile cancer, pharyngeal cancer, pheochromocytoma, pituitary tumor, plasma cell neoplasm/multiple myeloma, pleuropulmonary blastoma, primary central nervous system (CNS) lymphoma, primary peritoneal cancer, prostate cancer, rectal cancer, recurrent cancer, renal cell cancer, retinoblastoma, rhabdomyosarcoma, salivary gland cancer, sarcoma, rhabdomyosarcoma, vascular tumors, osteosarcoma, soft tissue sarcoma, uterine sarcoma, Sézary syndrome, skin cancer, small intestine cancer, squamous cell carcinoma of the skin, squamous neck cancer with occult primary, stomach cancer, T-cell lymphoma, testicular cancer, throat cancer, nasopharyngeal cancer, oropharyngeal cancer, hypopharyngeal cancer, thymoma and thymic carcinoma, thyroid cancer, transitional cell cancer of the renal pelvis and ureter, ureter and renal pelvis, urethral cancer, uterine cancer, endometrial, uterine sarcoma, vaginal cancer, vascular tumors, vulvar cancer, and Wilms tumor and other childhood kidney tumors. In some embodiments, the therapeutic agent is selected from Table 2A. In some embodiments, the therapeutic agent is selected from Table 2B. In some embodiments, the therapeutic agent is selected from Table 3.

[0108] A non-limiting example of a method for treating cancer in a subject comprises: administering to the subject a therapeutic molecule selected from a library of therapeutic molecules, wherein the therapeutic molecule has been selected by a method comprising: modifying cancer cells from the subject to knock down or knock out the function of a plurality of genes, each gene in the plurality of genes encoding for a protein target of a therapeutic molecule in the library of therapeutic molecules, whereby the therapeutic molecule has been selected if knocking down or knocking out the function of the gene that encodes for the protein target of the selected therapeutic molecule impairs cancer cell viability. The library of therapeutic molecules may comprise at least 1, at least 2, at least 3, at least 4, at least 5, at least 10, or at least 20 therapeutic agents of Table 2. The library of therapeutic molecules may comprise at least 1, at least 2, at least 3, at least 4, at least 5, at least 10, or at least 20 therapeutic agents of Table 3. The one or more of the plurality of genes may encode for a protein of Table 5B. The one or more of the plurality of genes may encode for a protein of Table 5A. The one or more of the plurality of genes may encode for a protein of Table 5C. The one or more of the plurality of genes may encode for a protein of Table 5D. The one or more of the plurality of genes may encode for a protein of Table 3. The one or more of the plurality of genes may encode for a protein of Table 4.

[0109] Another exemplary method for treating cancer comprises: administering to the subject a therapeutic molecule selected from a library of therapeutic molecules; wherein the cancer of the subject has been determined to be susceptible to the selected therapeutic molecule by a method comprising: (a) contacting a sample of cancer cells from the subject with a library of gene modulatory reagents to generate a plurality of modified cancer cells, wherein each modified cancer cell harbors one or more of the gene modulatory reagents, and each gene modulatory reagent is capable of knocking down or knocking out the function of a gene that encodes a protein target of a therapeutic molecule in the library of therapeutic molecules, and (b) sequencing the plurality of modified cancer cells, wherein a gene modulatory reagent that impairs cell viability will have fewer sequence reads than a gene modulatory reagent that does not impair cell viability, and the gene that is knocked down or knocked out by the gene modulatory reagent that impairs cell viability encodes for the protein targeted by the selected therapeutic molecule. In some cases, prior to sequencing, the plurality of modified cancer cells has been propagated. Propagation may comprise maintenance of the modified cancer cells in a 2D in vitro culture. Propagation may comprise maintenance of the modified cancer cells in a 3D in vitro culture. Propagation may comprise maintenance of the modified cancer cells in vivo. Propagation may occur within an animal model, e.g., where the animal is a rodent.

[0110] In some embodiments, the cancer cells contacted with the library of gene modulatory reagents are primary cancer cells. Contacting may comprise introducing the one or more gene modulatory reagents into each cancer cell by a viral or non-viral delivery method. Each of the gene modulatory reagents in the library may be encoded on a viral vector. In non-limiting embodiments, the viral vector comprises a lentiviral vector, adenoviral vector, or adeno-associated viral vector. An exemplary non-viral delivery method comprises transposase-mediated transposition.

[0111] In some embodiments, the library of therapeutic molecules comprises at least 1, at least 2, at least 3, at least 4, at least 5, at least 10, or at least 20 therapeutic agents of Table 2. In some embodiments, the library of therapeutic molecules comprises at least 1, at least 2, at least 3, at least 4, at least 5, at least 10, or at least 20 therapeutic agents of Table 3. In some embodiments, the library of gene modulatory reagents comprises from about 10 to about 2,000, from about 10 to about 500, from about 10 to about 200, from about 10 to about 150, from about 50 to about 500, from about 50 to about 200, from about 50 to about 2,000, from about 100 to about 2,000, or from about 500 to about 2,000 different gene modulatory reagents. In some embodiments, one or more gene modulatory reagents from the library of gene modulatory reagents comprises a nucleic acid sequence homologous to at least about 15 contiguous nucleotides of a gene encoding a protein of Table 5B. In some embodiments, one or more gene modulatory reagents from the library of gene modulatory reagents comprises a nucleic acid sequence homologous to at least about 15 contiguous nucleotides of a gene encoding a protein of Table 5C. In some embodiments, one or more gene modulatory reagents from the library of gene modulatory reagents comprises a nucleic acid sequence homologous to at least about 15 contiguous nucleotides of a gene encoding a protein of Table 5A. In some embodiments, one or more gene modulatory reagents from the library of gene modulatory reagents comprises a nucleic acid sequence homologous to at least about 15 contiguous nucleotides of a gene encoding a protein of Table 5D. In some embodiments, one or more gene modulatory reagents from the library of gene modulatory reagents comprises a nucleic acid sequence homologous to at least about 15 contiguous nucleotides of a gene encoding a protein of Table 3. In some embodiments, one or more gene modulatory reagents from the library of gene modulatory reagents comprises a nucleic acid sequence homologous to at least about 15 contiguous nucleotides of a gene encoding a protein of Table 4. The homology may be least about 90% sequence homology or identity.

[0112] In some cases, one or more of the gene modulatory reagents each comprise a gRNA sequence comprising at least about 90% homology or identity to a sequence selected from SEQ ID NOS: 1-1525. In some cases, one or more of the gene modulatory reagents each comprise a gRNA sequence comprising at least about 90% homology or identity to a sequence selected from SEQ ID NOS: 1-2789, 2980-3071. In some cases, one or more of the gene modulatory reagents each comprise a gRNA sequence comprising at least about 90% homology or identity to a sequence selected from SEQ ID NOS: 2980-3071. In some cases, one or more of the gene modulatory reagents each comprise a gRNA sequence comprising at least about 90% homology or identity to a sequence selected from SEQ ID NOS: 1526-2789. In some cases, one or more of the gene modulatory reagents each comprise a gRNA sequence comprising at least about 90% homology or identity to a sequence selected from SEQ ID NOS: 2790-2959. In some embodiments, each gene modulatory reagent comprises a gRNA sequence comprising homology to at least a portion of the gene that encodes a protein target of a therapeutic molecule in the library of therapeutic molecules. The gRNA may comprise homology to about 10 to about 50 contiguous nucleotides of the gene. The homology may be at least about 90% sequence homology or identity. The gRNA may be positioned within a vector, e.g., for viral delivery as discussed herein.

[0113] The method of determining susceptibility to the selected therapeutic molecule may further comprise contacting the cells with an endonuclease. In some embodiments, the endonuclease comprises a Cas9 or Cas12a endonuclease. Non-limiting examples of Cas9 or Cas12a endonucleases include S. pyogenes Cas9 (SpCas9), SpCas9 D1135E variant, SpCas9 VRER variant, SpCas9 EQR variant, xCas9, SpCas9-NG, S. aureus Cas9 (SaCas9), Acidaminococcus sp. (AsCpfl), Lachnospiraceae bacterium (LbCpfl), AsCpfl RR variant, LbCpfl RR variant, AsCpfl RVR variant, C. jejuni Cas9 (CjCas9), N. meningitidis (NmCas9), S. thermophilus (StCas9), T. denticola (TdCas9), and Mad7. In some embodiments, the endonuclease does not comprise a Cas9 or Cas12a endonuclease.

[0114] In some embodiments, the gene modulatory reagents comprise a shRNA sequence comprising homology to at least a portion of the gene that encodes a protein target of a therapeutic molecule in the library of therapeutic molecules. The shRNA may comprise homology to about 10 to about 50 contiguous nucleotides of the gene. The homology may be at least about 90% sequence homology or identity. The shRNA may be positioned within a vector, e.g., for viral delivery as discussed herein.

### Further Embodiments

[0115] (1) A method of treating cancer in a subject in need thereof, the method comprising administering to the subject a therapeutic molecule selected from a library of therapeutic molecules; wherein the therapeutic molecule has been selected by a method comprising: modifying cancer cells from the subject to knock down or knock out the function of a plurality of genes, each gene in the plurality of genes encoding for a protein target of a therapeutic molecule in the library of therapeutic molecules, whereby the therapeutic molecule has been selected if knocking down or knocking out the function of the gene that encodes for the protein target of the selected therapeutic molecule impairs cancer cell viability.

[0116] (2) The method of embodiment 1, wherein the library of therapeutic molecules comprises at least 1, at least 2, at least 3, at least 4, at least 5, at least 10, or at least 20 therapeutic agents of Tables 2-3.

[0117] (3) The method of embodiment 1 or embodiment 2, wherein one or more of the plurality of genes encode for a protein of Table 3-5D.

[0118] (4) A method of treating cancer in a subject in need thereof, the method comprising administering to the subject a therapeutic molecule selected from a library of therapeutic molecules; wherein the cancer of the subject has been determined to be susceptible to the selected therapeutic molecule by a method comprising:
[0119] (a) contacting a sample of cancer cells from the subject with a library of gene modulatory reagents to generate a plurality of modified cancer cells, wherein each modified cancer cell harbors one or more of the gene modulatory reagents, and each gene modulatory reagent is capable of knocking down or knocking out the function of a gene that encodes a protein target of a therapeutic molecule in the library of therapeutic molecules, and
[0120] (b) sequencing the plurality of modified cancer cells, wherein a gene modulatory reagent that impairs cell viability will have fewer sequence reads than a gene modulatory reagent that does not impair cell viability, and the gene that is knocked down or knocked out by the gene modulatory reagent that impairs cell viability encodes for the protein targeted by the selected therapeutic molecule.

[0121] (5) The method of embodiment 4, wherein prior to sequencing, one or more of the plurality of modified cancer cells have been propagated.

[0122] (6) The method of embodiment 5, wherein propagation comprises maintenance of the modified cancer cells in a 2D in vitro culture.

[0123] (7) The method of embodiment 5, wherein propagation comprises maintenance of the modified cancer cells in a 3D in vitro culture.

[0124] (8) The method of embodiment 5, wherein propagation comprises maintenance of the modified cancer cells in vivo.

[0125] (9) The method of embodiment 8, wherein propagation occurs within an animal model.

[0126] (10) The method of embodiment 9, wherein the animal is a rodent.

[0127] (11) The method of any one of embodiments 4-10, wherein the cancer cells are primary cancer cells.

[0128] (12) The method of any one of embodiments 4-11, wherein contacting comprises introducing the one or more gene modulatory reagents into each cancer cell by a viral or non-viral delivery method.

[0129] (13) The method of embodiment 12, wherein one or more of the gene modulatory reagents in the library are encoded on a viral vector.

[0130] (14) The method of embodiment 13, wherein the viral vector comprises a lentiviral vector, adenoviral vector, or adeno-associated viral vector.

[0131] (15) The method of embodiment 12, wherein the non-viral delivery method comprises transposase-mediated transposition.

[0132] (16) The method of any one of embodiments 4-15, wherein the library comprises from about 10 to about 2,000, from about 10 to about 500, from about 10 to about 200, from about 10 to about 150, from about 50 to about 500, from about 50 to about 200, from about 50 to about 2,000, from about 100 to about 2,000, or from about 500 to about 2,000 different gene modulatory reagents.

[0133] (17) The method of any one of embodiments 4-16, wherein one or more gene modulatory reagents from the library of gene modulatory reagents comprises a nucleic acid sequence homologous to at least about 15 contiguous nucleotides of a gene encoding a protein of Tables 3-5D.

[0134] (18) The method of embodiment 17, wherein the homology is at least about 90% sequence homology.

[0135] (19) The method of embodiment 18, wherein the homology is at least about 90% sequence identity.

[0136] (20) The method of any one of embodiments 4-19, wherein the library of therapeutic molecules comprises at least 1, at least 2, at least 3, at least 4, at least 5, at least 10, or at least 20 therapeutic agents of Tables 2-3.

[0137] (21) The method of any one of embodiments 4-20, wherein the cancer comprises at least one cancer chosen from the group comprising acute lymphoblastic leukemia (ALL), acute myeloid leukemia (AML), adrenocortical carcinoma, AIDS-related cancers, Kaposi sarcoma, AIDS-related lymphoma, primary CNS lymphoma, anal cancer, appendix cancer, astrocytomas, atypical teratoid/rhabdoid tumor, central nervous system cancers, basal cell carcinoma of the skin, bile duct cancer, bladder cancer, bone cancer, brain tumors, breast cancer, bronchial tumors, Burkitt lymphoma, carcinoid tumor, cardiac tumors, central nervous system cancers, embryonal tumors, germ cell tumor, primary CNS lymphoma, cervical cancer, cholangiocarcinoma, chordoma, chronic lymphocytic leukemia (CLL), chronic myelogenous leukemia (CML), chronic myeloproliferative neoplasms, colorectal cancer, craniopharyngioma, cutaneous t-cell lymphoma, ductal carcinoma in situ (DCIS), embryonal tumors, central nervous system cancer, endometrial cancer, ependymoma, esophageal cancer, esthesioneuroblastoma, Ewing sarcoma, extracranial germ cell tumor, extragonadal germ cell tumor, eye cancer, intraocular melanoma, retinoblastoma, fallopian tube cancer, fibrous histiocytoma of bone, osteosarcoma, gallbladder cancer, gastric cancer, gastrointestinal carcinoid tumor, gastrointestinal stromal tumors (GIST), testicular cancer, gestational trophoblastic disease, hairy cell leukemia, head and neck cancer, heart tumors, hepatocellular cancer, Hodgkin lymphoma, hypopharyngeal cancer, intraocular melanoma, islet cell tumors, pancreatic neuroendocrine tumors, kidney cancer, Langerhans cell histiocytosis, laryngeal cancer, leukemia, lip and oral cavity cancer, liver cancer, lung cancer (non-small cell and small cell), lymphoma, male breast cancer, malignant fibrous histiocytoma of bone and osteosarcoma, melanoma, intraocular melanoma, Merkel cell carcinoma, mesothelioma, metastatic cancer, metastatic squamous neck cancer with occult primary, midline tract carcinoma with NUT gene changes, mouth cancer, multiple endocrine neoplasia syndromes, multiple myeloma/plasma cell neoplasms, mycosis fungoides, myelodysplastic syndromes, myelodysplastic/myeloproliferative neoplasms, myelogenous leukemia, chronic (CML), myeloid leukemia, acute (AML), nasal cavity and paranasal sinus cancer, nasopharyngeal cancer, neuroblastoma, non-Hodgkin lymphoma, non-small cell lung cancer, oral cancer, oropharyngeal cancer, ovarian cancer, pancreatic cancer, pancreatic neuroendocrine tumors (islet cell tumors), papillomatosis, paraganglioma, paranasal sinus and nasal cavity cancer, parathyroid cancer, penile cancer, pharyngeal cancer, pheochromocytoma, pituitary tumor, plasma cell neoplasm/multiple myeloma, pleuropulmonary blastoma, primary central nervous system (CNS) lymphoma, primary peritoneal cancer, prostate cancer, rectal cancer, recurrent cancer, renal cell cancer, retinoblastoma, rhabdomyosarcoma, salivary gland cancer, sarcoma, rhabdomyosarcoma, vascular tumors, osteosarcoma, soft tissue sarcoma, uterine sarcoma, Sézary syndrome, skin cancer, small intestine cancer, squamous cell carcinoma of the skin, squamous neck cancer with occult primary, stomach cancer, T-cell lymphoma, testicular cancer, throat cancer, nasopharyngeal cancer, oropharyngeal cancer, hypopharyngeal cancer, thymoma and thymic carcinoma, thyroid cancer, transitional cell cancer of the renal pelvis and ureter, ureter and renal pelvis, urethral cancer, uterine cancer, endometrial, uterine sarcoma, vaginal cancer, vascular tumors, vulvar cancer, Wilms tumor, and other childhood kidney tumors.

[0138] (22) The method of any one of embodiments 4-21, wherein one or more of the gene modulatory reagents each comprise a guide RNA (gRNA) sequence comprising at least about 90% homology to a sequence selected from SEQ ID NOS: 1-1525, SEQ ID NOS: 1-2789, SEQ ID NOS: 1526-2789, and/or SEQ ID NOS: 2980-3071.

[0139] (23) The method of embodiment 22, wherein the at least about 90% homology is at least about 90% identity.

[0140] (24) The method of any one of embodiments 4-23, wherein one or more of the gene modulatory reagents comprise a guide RNA (gRNA) sequence comprising homology to at least a portion of the gene that encodes a protein target of a therapeutic molecule in the library of therapeutic molecules.

[0141] (25) The method of embodiment 24, wherein the gRNA comprises homology to about 10 to about 50 contiguous nucleotides of the gene.

[0142] (26) The method of embodiment 24 or embodiment 25, wherein the homology is at least about 90% sequence homology.

[0143] (27) The method of embodiment 26, wherein the homology is at least about 90% sequence identity.

[0144] (28) The method of any one of embodiments 4-27, wherein the sample of cancer cells is contacted with an endonuclease.

[0145] (29) The method of embodiment 28, wherein the endonuclease comprises a Cas9 or Cas12a endonuclease.

[0146] (30) The method of embodiment 29, wherein the Cas9 or Cas12a endonuclease is selected from S. pyogenes Cas9 (SpCas9), SpCas9 D1135E variant, SpCas9 VRER variant, SpCas9 EQR variant, xCas9, SpCas9-NG, S. aureus Cas9 (SaCas9), Acidaminococcus sp. (AsCpfl), Lachnospiraceae bacterium (LbCpfl), AsCpfl RR variant, LbCpfl RR variant, AsCpfl RVR variant, C. jejuni Cas9 (CjCas9), N. meningitidis (NmCas9), S. thermophilus (StCas9), T. denticola (TdCas9), and Mad7.

[0147] (31) The method of embodiment 28, wherein the endonuclease does not comprise a Cas9 or Cas12a endonuclease.

[0148] (32) The method of any one of embodiments 24-31, wherein the gRNA is positioned within a vector.

[0149] (33) The method of embodiment 32, wherein the vector further comprises genetic elements of a virus.

[0150] (34) The method of embodiment 33, wherein the virus comprises an adenovirus, retrovirus, adeno-associated virus (AAV), pox virus, parvovirus, baculovirus, measles virus, herpes simplex virus (HSV), Moloney Murine Leukemia Virus (MoMLV, MMLV, MuLV, or MLV), Murine Stem cell Virus (MSCV), or human immunodeficiency virus (HIV), or a combination thereof.

[0151] (35) The method of any one of embodiments 32-34, wherein the vector further comprises an auxiliary nucleic acid sequence.

[0152] (36) The method of embodiment 35, wherein the auxiliary nucleic acid sequence comprises a sequence encoding a marker, an antibiotic resistance cassette, and surface epitope expression cassette.

[0153] (37) The method of embodiment 36, wherein the marker is a fluorescent marker.

[0154] (38) The method of any one of embodiments 35-37, wherein the auxiliary nucleic acid allows for the selection of cancer cells that have been modified to harbor the one or more gene modulatory reagents.

[0155] (39) The method of any one of embodiments 4-23, wherein one or more of the gene modulatory reagents comprise a short hairpin RNA (shRNA) sequence comprising homology to at least a portion of the gene that encodes a protein target of a therapeutic molecule in the library of therapeutic molecules.

[0156] (40) The method of embodiment 39, wherein the shRNA comprises homology to about 10 to about 50 contiguous nucleotides of the gene.

[0157] (41) The method of embodiment 39 or embodiment 40, wherein the homology is at least about 90% sequence homology.

[0158] (42) The method of embodiment 41, wherein the homology is at least about 90% sequence identity.

[0159] (43) The method of any one of embodiments 39-42, wherein the shRNA is positioned within a vector.

[0160] (44) The method of embodiment 43, wherein the vector further comprises genetic elements of a virus.

[0161] (45) The method of embodiment 44, wherein the virus comprises an adenovirus, retrovirus, adeno-associated virus (AAV), pox virus, parvovirus, baculovirus, measles virus, herpes simplex virus (HSV), Moloney Murine Leukemia Virus (MoMLV, MMLV, MuLV, or MLV), Murine Stem cell Virus (MSCV), or human immunodeficiency virus (HIV), or a combination thereof.

[0162] (46) The method of any one of embodiments 43-45, wherein the vector further comprises an auxiliary nucleic acid sequence.

[0163] (47) The method of embodiment 46, wherein the auxiliary nucleic acid sequence comprises a sequence encoding a marker, an antibiotic resistance cassette, or surface epitope expression cassette.

[0164] (48) The method of embodiment 47, wherein the marker is a fluorescent marker.

[0165] (49) The method of any one of embodiments 46-48, wherein the auxiliary nucleic acid allows for the selection of cancer cells that have been modified to harbor the one or more gene modulatory reagents.

[0166] (50) A method of generating a plurality of modified cancer cells from a subject having cancer, the method comprising delivering a library of gene modulatory reagents to a sample of cancer cells from the subject to generate the plurality of modified cancer cells; wherein each modified cancer cell harbors one or more of the gene modulatory reagents, and each gene modulatory reagent is capable of knocking down or knocking out the function of a gene that encodes a protein target from a library of protein targets.

[0167] (51) The method of embodiment 50, wherein one or more of the gene modulatory reagents comprises a guide RNA (gRNA) sequence comprising homology to at least a portion of the gene whose function is knocked down or knocked out in the modified cancer cell.

[0168] (52) The method of embodiment 51, wherein the gRNA comprises homology to about 10 to about 50 contiguous nucleotides of the gene.

[0169] (53) The method of embodiment 51 or embodiment 52, wherein the homology is at least about 90% sequence homology.

[0170] (54) The method of embodiment 53, wherein the homology is at least about 90% sequence identity.

[0171] (55) The method of embodiment 50, wherein one or more of the gene modulatory reagents each comprise a guide RNA (gRNA) sequence comprising at least about 90% homology to a sequence selected from SEQ ID NOS: 1-1525, SEQ ID NOS: 1-2789, SEQ ID NOS: 1526-2789, and/or SEQ ID NOS: 2980-3071.

[0172] (56) The method of embodiment 55, wherein the homology is at least about 90% identity.

[0173] (57) The method of any one of embodiments 50-56, wherein the sample of cancer cells is contacted with an endonuclease.

[0174] (58) The method of embodiment 57, wherein the endonuclease comprises a Cas9 or Cas12a endonuclease.

[0175] (59) The method of embodiment 58, wherein the Cas9 or Cas12a endonuclease is selected from S. pyogenes Cas9 (SpCas9), SpCas9 D1135E variant, SpCas9 VRER variant, SpCas9 EQR variant, xCas9, SpCas9-NG, S. aureus Cas9 (SaCas9), Acidaminococcus sp. (AsCpfl), Lachnospiraceae bacterium (LbCpfl), AsCpfl RR variant, LbCpfl RR variant, AsCpfl RVR variant, C. jejuni Cas9 (CjCas9), N. meningitidis (NmCas9), S. thermophilus (StCas9), T. denticola (TdCas9), and Mad7.

[0176] (60) The method of embodiment 57, wherein the endonuclease does not comprise a Cas9 or Cas12a endonuclease.

[0177] (61) The method of any one of embodiments 51-56, wherein the gRNA is positioned within a vector.

[0178] (62) The method of embodiment 61, wherein the vector further comprises genetic elements of a virus.

[0179] (63) The method of embodiment 62, wherein the virus comprises an adenovirus, retrovirus, adeno-associated virus (AAV), pox virus, parvovirus, baculovirus, measles virus, herpes simplex virus (HSV), Moloney Murine Leukemia Virus (MoMLV, MMLV, MuLV, or MLV), Murine Stem cell Virus (MSCV), or human immunodeficiency virus (HIV), or a combination thereof.

[0180] (64) The method of any one of embodiments 61-63, wherein the vector further comprises an auxiliary nucleic acid sequence.

[0181] (65) The method of embodiment 64, wherein the auxiliary nucleic acid sequence comprises a sequence encoding a marker, an antibiotic resistance cassette, or surface epitope expression cassette.

[0182] (66) The method of embodiment 65, wherein the marker is a fluorescent marker.

[0183] (67) The method of any one of embodiments 64-66, wherein the auxiliary nucleic acid allows for the selection of cancer cells that have been modified to harbor the one or more gene modulatory reagents.

[0184] (68) The method of embodiment 50, wherein one or more of the gene modulatory reagents comprise a short hairpin RNA (shRNA) sequence comprising homology to at least a portion of the gene whose function is knocked down or knocked out in the modified cancer cell.

[0185] (69) The method of embodiment 68, wherein the shRNA comprises homology to about 10 to about 50 contiguous nucleotides of the gene.

[0186] (70) The method of embodiment 68 or embodiment 69, wherein the homology is at least about 90% sequence homology.

[0187] (71) The method of embodiment 70, wherein the homology is at least about 90% sequence identity.

[0188] (72) The method of any one of embodiments 68-71, wherein the shRNA is positioned within a vector.

[0189] (73) The method of embodiment 72, wherein the vector further comprises genetic elements of a virus.

[0190] (74) The method of embodiment 73, wherein the virus comprises an adenovirus, retrovirus, adeno-associated virus (AAV), pox virus, parvovirus, baculovirus, measles virus, herpes simplex virus (HSV), Moloney Murine Leukemia Virus (MoMLV, MMLV, MuLV, or MLV), Murine Stem cell Virus (MSCV), or human immunodeficiency virus (HIV), or a combination thereof.

[0191] (75) The method of any one of embodiments 72-74, wherein the vector further comprises an auxiliary nucleic acid sequence.

[0192] (76) The method of embodiment 75, wherein the auxiliary nucleic acid sequence comprises a sequence encoding a marker, an antibiotic resistance cassette, or surface epitope expression cassette.

[0193] (77) The method of embodiment 76, wherein the marker is a fluorescent marker.

[0194] (78) The method of any one of embodiments 75-77, wherein the auxiliary nucleic acid allows for the selection of cancer cells that have been modified to harbor the one or more gene modulatory reagents.

[0195] (79) The method of embodiment 50, wherein delivering comprising transposase-mediated transposition.

[0196] (80) The method of any one of embodiments 50-79, wherein the sample of cancer cells comprises primary cancer cells.

[0197] (81) The method of any one of embodiments 50-80, wherein the sample of cancer cells comprises about 10⁵ to about 10⁸ cells.

[0198] (82) The method of any one of embodiments 50-81, wherein the library comprises from about 10 to about 2,000, from about 10 to about 500, from about 10 to about 200, from about 10 to about 150, from about 50 to about 500, from about 50 to about 200, from about 50 to about 2,000, from about 100 to about 2,000, or from about 500 to about 2,000 different gene modulatory reagents.

[0199] (83) The method of any one of embodiments 50-82, wherein at least about 90% of the gene modulatory reagents are present in the library in a quantity within about 10% of the average gene modulatory reagent quantity.

[0200] (84) The method of any one of embodiments 50-83, wherein the library of protein targets comprises at least 1, at least 2, at least 3, at least 4, at least 5, at least 10, or at least 20 protein targets of Tables 3-5D.

[0201] (85) The method of any one of embodiments 50-84, wherein the sample of cancer cells has been processed to preserve cell viability.

[0202] (86) The method of any one of embodiments 50-85, further comprising preparing the sample of cancer cells to preserve cell viability prior to and/or after delivery of the library of gene modulatory reagents.

[0203] (87) The method of any one of embodiments 50-86, further comprising propagating the modified cancer cells.

[0204] (88) The method of embodiment 87, wherein propagation comprises maintenance of the modified cancer cells in a 2D in vitro culture.

[0205] (89) The method of embodiment 87, wherein propagation comprises maintenance of the modified cancer cells in a 3D in vitro culture.

[0206] (90) The method of embodiment 87, wherein propagation comprises maintenance of the modified cancer cells in vivo.

[0207] (91) The method of embodiment 90, wherein propagation occurs within an animal model.

[0208] (92) The method of embodiment 91, wherein the animal model is a rodent.

[0209] (93) A compilation comprising a plurality of modified cancer cells, wherein each modified cancer cell harbors one or more gene modulatory reagents, and each gene modulatory reagent is capable of knocking down or knocking out the function of a gene that encodes a protein target from a library of protein targets.

[0210] (94) The compilation of embodiment 93, wherein at least one of the one or more gene modulatory reagents comprises a sequence selected from SEQ ID NOS: 1-1525, SEQ ID NOS: 1-2789, SEQ ID NOS: 1526-2789, and/or SEQ ID NOS: 2980-3071.

[0211] (95) The compilation of embodiment 93, wherein at least one of the one or more of gene modulatory reagents comprises a sequence at least about 90% homologous to a sequence selected from SEQ ID NOS: 1-1525, SEQ ID NOS: 1-2789, SEQ ID NOS: 1526-2789, and/or SEQ ID NOS: 2980-3071.

[0212] (96) The compilation of embodiment 95, wherein the homology is 90% identity.

[0213] (97) The compilation of any of embodiments 93-96, wherein the library of protein targets comprises at least 1, at least 2, at least 3, at least 4, at least 5, at least 10, or at least 20 protein targets of Tables 3-5D.

[0214] (98) The compilation of any of embodiments 93-97, wherein one of more of the gene modulatory reagents comprise a guide RNA (gRNA) sequence comprising homology to at least a portion of the gene whose function is knocked down or knocked out in the modified cancer cell.

[0215] (99) The compilation of embodiment 98, wherein the gRNA comprises homology to about 10 to about 50 contiguous nucleotides of the gene.

[0216] (100) The compilation of embodiment 98 or embodiment 99, wherein the homology is at least about 90% sequence homology.

[0217] (101) The compilation of embodiment 100, wherein the homology is at least about 90% sequence identity.

[0218] (102) The compilation of any one of embodiments 93-101, further comprising an endonuclease.

[0219] (103) The compilation of embodiment 102, wherein the endonuclease comprises a Cas9 or Cas12a endonuclease.

[0220] (104) The method of embodiment 103, wherein the Cas9 or Cas12a endonuclease is selected from S. pyogenes Cas9 (SpCas9), SpCas9 D1135E variant, SpCas9 VRER variant, SpCas9 EQR variant, xCas9, SpCas9-NG, S. aureus Cas9 (SaCas9), Acidaminococcus sp. (AsCpfl), Lachnospiraceae bacterium (LbCpfl), AsCpfl RR variant, LbCpfl RR variant, AsCpfl RVR variant, C. jejuni Cas9 (CjCas9), N. meningitidis (NmCas9), S. thermophilus (StCas9), T. denticola (TdCas9), and Mad7.

[0221] (105) The compilation of embodiment 102, wherein the endonuclease does not comprise a Cas9 or Cas12a endonuclease.

[0222] (106) The compilation of any one of embodiments 98-105, wherein the gRNA is positioned within a vector.

[0223] (107) The compilation of embodiment 106, wherein the vector further comprises genetic elements of a virus.

[0224] (108) The compilation of embodiment 107, wherein the virus comprises an adenovirus, retrovirus, adeno-associated virus (AAV), pox virus, parvovirus, baculovirus, measles virus, herpes simplex virus (HSV), Moloney Murine Leukemia Virus (MoMLV, MMLV, MuLV, or MLV), Murine Stem cell Virus (MSCV), or human immunodeficiency virus (HIV), or a combination thereof.

[0225] (109) The compilation of any one of embodiments 106-108, wherein the vector further comprises an auxiliary nucleic acid sequence.

[0226] (110) The compilation of embodiment 109, wherein the auxiliary nucleic acid sequence comprises a sequence encoding a marker, an antibiotic resistance cassette, or surface epitope expression cassette.

[0227] (111) The compilation of embodiment 110, wherein the marker is a fluorescent marker.

[0228] (112) The compilation of any one of embodiments 109-111, wherein the auxiliary nucleic acid allows for the selection of the modified cancer cells.

[0229] (113) The compilation of embodiment 93, wherein one or more of the gene modulatory reagents comprise a short hairpin RNA (shRNA) sequence comprising homology to at least a portion of the gene whose function is knocked down or knocked out in the modified cancer cell.

[0230] (114) The compilation of embodiment 113, wherein the shRNA comprises homology to about 10 to about 50 contiguous nucleotides of the gene.

[0231] (115) The compilation of embodiment 113 or embodiment 114, wherein the homology is at least about 90% sequence homology.

[0232] (116) The compilation of embodiment 115, wherein the homology is at least about 90% sequence identity.

[0233] (117) The compilation of any one of embodiments 113-116, wherein the shRNA is positioned within a vector.

[0234] (118) The compilation of embodiment 117, wherein the vector further comprises genetic elements of a virus.

[0235] (119) The compilation of embodiment 118, wherein the virus comprises an adenovirus, retrovirus, adeno-associated virus (AAV), pox virus, parvovirus, baculovirus, measles virus, herpes simplex virus (HSV), Moloney Murine Leukemia Virus (MoMLV, MMLV, MuLV, or MLV), Murine Stem cell Virus (MSCV), or human immunodeficiency virus (HIV), or a combination thereof.

[0236] (120) The compilation of any one of embodiments 117-119, wherein the vector further comprises an auxiliary nucleic acid sequence.

[0237] (121) The compilation of embodiment 120, wherein the auxiliary nucleic acid sequence comprises a sequence encoding a marker, an antibiotic resistance cassette, or surface epitope expression cassette.

[0238] (122) The compilation of embodiment 121, wherein the marker is a fluorescent marker.

[0239] (123) The compilation of any one of embodiments 120-122, wherein the auxiliary nucleic acid allows for the selection of the modified cancer cells.

[0240] (124) The compilation of any one of embodiments 93-105, wherein delivering comprising transposase-mediated transposition.

[0241] (125) The compilation of any one of embodiments 93-124, wherein the modified cancer cells are modified primary cancer cells.

[0242] (126) The compilation of any one of embodiments 93-125, comprising from about 10 to about 2,000, from about 10 to about 500, from about 10 to about 200, from about 10 to about 150, from about 50 to about 500, from about 50 to about 200, from about 50 to about 2,000, from about 100 to about 2,000, or from about 500 to about 2,000 different gene modulatory reagents.

[0243] (127) The compilation of any one of embodiments 93-126, comprising from about 10 to about 2,000, from about 10 to about 500, from about 10 to about 200, from about 10 to about 150, from about 50 to about 500, from about 50 to about 200, from about 50 to about 2,000, from about 100 to about 2,000, or from about 500 to about 2,000 different populations of modified cancer cells.

[0244] (128) A method of evaluating the functional effect of genetically modifying cancer cells from a subject, the method comprising: sequencing a plurality of modified cancer cells, wherein each modified cancer cell harbors one or more gene modulatory reagents, each gene modulatory reagent capable of knocking down or knocking out the function of a gene that encodes a protein target in a library of protein targets; and wherein a gene modulatory reagent that impairs cell viability will have fewer sequence reads than a gene modulatory reagent that does not impair cell viability.

[0245] (129) The method of embodiment 128, further comprising determining which gene modulatory regents have fewer than a threshold number of sequence reads.

[0246] (130) The method of embodiment 129, wherein the threshold number of sequence reads is an expected number of sequence reads if the gene modulatory reagent did not impair cell viability.

[0247] (131) The method of embodiment 129, wherein the threshold number of sequence reads is an average number of sequence reads for each gene modulatory reagent in the plurality of modified cancer cells.

[0248] (132) The method of any one of embodiments 128-131, further comprising correlating each gene modulatory reagent that has fewer than the threshold number of sequence reads to its corresponding protein target in the library of protein targets.

[0249] (133) The method of embodiment 132, further comprising correlating the corresponding protein target to a therapeutic molecule.

[0250] (134) The method of any one of embodiments 128-133, wherein the library of protein targets comprises at least 1, at least 2, at least 3, at least 4, at least 5, at least 10, or at least 20 protein targets of Tables 3-5D.

[0251] (135) The method of any one of embodiments 128-134, wherein one or more of the gene modulatory reagents each comprise a guide RNA (gRNA) sequence comprising at least about 90% homology to a sequence selected from SEQ ID NOS: 1-1525, SEQ ID NOS: 1-2789, SEQ ID NOS: 1526-2789, and/or SEQ ID NOS: 2980-3071.

[0252] (136) The method of embodiment 135, wherein the at least about 90% homology is at least about 90% identity.

[0253] (137) A library comprising a plurality of gene modulatory reagents, each gene modulatory reagent capable of knocking down or knocking out the function of a gene that encodes a protein target from a library of protein targets.

[0254] (138) The library of embodiment 137, wherein the plurality of gene modulatory reagents is capable of knocking down or knocking out the function of at least about 50% of the genes that encode for the protein targets in the library.

[0255] (139) The library of embodiment 138, wherein the at least about 50% is at least about 60%.

[0256] (140) The library of embodiment 139, wherein the at least about 60% is at least about 70%.

[0257] (141) The library of embodiment 140, wherein the at least about 70% is at least about 80%.

[0258] (142) The library of embodiment 141, wherein the at least about 80% is at least about 90%.

[0259] (143) The library of any one of embodiments 137-142, wherein the library of protein targets comprises all known proteins targeted by known drugs capable of treating a particular disease or condition.

[0260] (144) The library of embodiment 143, wherein the disease or condition is cancer.

[0261] (145) The library of embodiment 144, wherein the cancer comprises at least one cancer from the group comprising acute lymphoblastic leukemia (ALL), acute myeloid leukemia (AML), adrenocortical carcinoma, AIDS-related cancers, Kaposi sarcoma, AIDS-related lymphoma, primary CNS lymphoma, anal cancer, appendix cancer, astrocytomas, atypical teratoid/rhabdoid tumor, central nervous system cancers, basal cell carcinoma of the skin, bile duct cancer, bladder cancer, bone cancer, brain tumors, breast cancer, bronchial tumors, Burkitt lymphoma, carcinoid tumor, cardiac tumors, central nervous system cancers, embryonal tumors, germ cell tumor, primary CNS lymphoma, cervical cancer, cholangiocarcinoma, chordoma, chronic lymphocytic leukemia (CLL), chronic myelogenous leukemia (CML), chronic myeloproliferative neoplasms, colorectal cancer, craniopharyngioma, cutaneous t-cell lymphoma, ductal carcinoma in situ (DCIS), embryonal tumors, central nervous system cancer, endometrial cancer, ependymoma, esophageal cancer, esthesioneuroblastoma, Ewing sarcoma, extracranial germ cell tumor, extragonadal germ cell tumor, eye cancer, intraocular melanoma, retinoblastoma, fallopian tube cancer, fibrous histiocytoma of bone, osteosarcoma, gallbladder cancer, gastric cancer, gastrointestinal carcinoid tumor, gastrointestinal stromal tumors (GIST), testicular cancer, gestational trophoblastic disease, hairy cell leukemia, head and neck cancer, heart tumors, hepatocellular cancer, Hodgkin lymphoma, hypopharyngeal cancer, intraocular melanoma, islet cell tumors, pancreatic neuroendocrine tumors, kidney cancer, Langerhans cell histiocytosis, laryngeal cancer, leukemia, lip and oral cavity cancer, liver cancer, lung cancer (non-small cell and small cell), lymphoma, male breast cancer, malignant fibrous histiocytoma of bone and osteosarcoma, melanoma, intraocular melanoma, Merkel cell carcinoma, mesothelioma, metastatic cancer, metastatic squamous neck cancer with occult primary, midline tract carcinoma with NUT gene changes, mouth cancer, multiple endocrine neoplasia syndromes, multiple myeloma/plasma cell neoplasms, mycosis fungoides, myelodysplastic syndromes, myelodysplastic/myeloproliferative neoplasms, myelogenous leukemia, chronic (CML), myeloid leukemia, acute (AML), nasal cavity and paranasal sinus cancer, nasopharyngeal cancer, neuroblastoma, non-Hodgkin lymphoma, non-small cell lung cancer, oral cancer, oropharyngeal cancer, ovarian cancer, pancreatic cancer, pancreatic neuroendocrine tumors (islet cell tumors), papillomatosis, paraganglioma, paranasal sinus and nasal cavity cancer, parathyroid cancer, penile cancer, pharyngeal cancer, pheochromocytoma, pituitary tumor, plasma cell neoplasm/multiple myeloma, pleuropulmonary blastoma, primary central nervous system (CNS) lymphoma, primary peritoneal cancer, prostate cancer, rectal cancer, recurrent cancer, renal cell cancer, retinoblastoma, rhabdomyosarcoma, salivary gland cancer, sarcoma, rhabdomyosarcoma, vascular tumors, osteosarcoma, soft tissue sarcoma, uterine sarcoma, Sézary syndrome, skin cancer, small intestine cancer, squamous cell carcinoma of the skin, squamous neck cancer with occult primary, stomach cancer, T-cell lymphoma, testicular cancer, throat cancer, nasopharyngeal cancer, oropharyngeal cancer, hypopharyngeal cancer, thymoma and thymic carcinoma, thyroid cancer, transitional cell cancer of the renal pelvis and ureter, ureter and renal pelvis, urethral cancer, uterine cancer, endometrial, uterine sarcoma, vaginal cancer, vascular tumors, vulvar cancer, Wilms tumor, and other childhood kidney tumors.

[0262] (146) The library of any one of embodiments 143-145, wherein the known drugs comprise at least 1, at least 2, at least 3, at least 4, at least 5, at least 10, or at least 20 drugs of Tables 2-3.

[0263] (147) The library of any one of embodiments 137-146, wherein the library of protein targets comprises at least 1, at least 2, at least 3, at least 4, at least 5, at least 10, or at least 20 protein targets of Tables 3-5D.

[0264] (148) The library of any one of embodiments 137-147, wherein one or more of the plurality of gene modulatory reagents each comprise a guide RNA (gRNA) sequence comprising at least about 90% homology to a sequence selected from SEQ ID NOS: 1-1525, SEQ ID NOS: 1-2789, SEQ ID NOS: 1526-2789, or SEQ ID NOS: 2980-3071.

[0265] (149) The library of embodiment 148, wherein the at least about 90% homology is at least about 90% identity.

[0266] (150) The library of any one of embodiments 137-149, wherein the plurality of gene modulatory reagents is capable of knocking down or knocking out the function of about 10 to about 2,000, from about 10 to about 500, from about 10 to about 200, from about 10 to about 150, from about 50 to about 500, from about 50 to about 200, about 50 to about 2,000, or about 100 to about 2,000 genes.

[0267] (151) The library of any one of embodiments 137-150, wherein the library comprises about 10 to about 2,000, from about 10 to about 500, from about 10 to about 200, from about 10 to about 150, from about 50 to about 500, from about 50 to about 200, about 50 to about 2,000, or about 100 to about 2,000 gene modulatory reagents.

[0268] (152) The library of any one of embodiments 137-151, wherein at least one of the gene modulatory reagents is capable of knocking out the function of a gene.

[0269] (153) The library of embodiment 152, wherein at least one of the gene modulatory reagents comprise a gRNA sequence having homology to at least a portion of the gene whose function is knocked out by the gene modulatory reagent.

[0270] (154) The library of any one of embodiments 137-147, wherein at least one of the gene modulatory reagents is capable of knocking down the function of a gene.

[0271] (155) The library of embodiment 154, wherein at least one of the gene modulatory reagents comprise a shRNA sequence having homology to at least a portion of the gene whose function is knocked down by the gene modulatory reagent.

[0272] (156) The library of embodiment 153 or embodiment 155, wherein the homology is at least about 90% sequence homology.

[0273] (157) The library of embodiment 156, wherein the homology is at least about 90% sequence identity.

[0274] (158) The library of embodiment 155 or embodiment 156, wherein the at least a portion is at least about 15 contiguous nucleotides.

[0275] (159) The library of any one of embodiments 137-158, wherein at least one of the gene modulatory reagents is positioned within a vector.

[0276] (160) The library of embodiment 159, wherein the vector comprises an adapter sequence.

[0277] (161) The library of embodiment 160, wherein the adapter sequence comprises a type IIS restriction enzyme cleavage sites.

[0278] (162) The library of any one of embodiments 159-161, wherein the vector further comprises genetic elements of a virus.

[0279] (163) The library of embodiment 162, wherein the virus comprises an adenovirus, retrovirus, adeno-associated virus (AAV), pox virus, parvovirus, baculovirus, measles virus, herpes simplex virus (HSV), Moloney Murine Leukemia Virus (MoMLV, MMLV, MuLV, or MLV), Murine Stem cell Virus (MSCV), or human immunodeficiency virus (HIV), or a combination thereof.

[0280] (164) The library of any one of embodiments 159-163, wherein the vector further comprises a sequence encoding a marker, an antibiotic resistance cassette, or surface epitope expression cassette.

[0281] (165) The library of embodiment 164, wherein the marker is a fluorescent marker.

### Tables

[0282] Tables 2-3 provide exemplary therapeutic agents, one or more of which may be a member of a drug library described herein.

TABLE 2
Exemplary cancer therapeutic agents.

681640
(5Z)-7-oxozeaenol
17-AAG
4EGI-1
5-fluorouracil
6-bromoindirubin-3′-oxime
7-ethyl-10-hydroxycamptothecin
Abarelix
Abemaciclib
Abexinostat
Abiraterone
abiraterone acetate
Abitrexate
ABT-199
ABT-263
ABT-737
ABT-869
ABT-888
AC220
AC55649
acalabrutinib
ado-trastuzumab emtansine
Adriamycin
adriamycin PFS
Adrucil
AEB071
AEE788, NVP-AEE788
AEW541
Afatinib
afatinib dimaleate
Aflibercept
Afuresertib
AG013736
AG014699
AG-014699
AHPN
AKT inhibitor VIII
aldesleukin
alectinib
alemtuzumab
alisertib
alitretinoin
all-trans retinoic acid
alpelisib
alvocidib
AM-580
amatuximab
AMG 208
AMG 337
AMG 595
AMG 780
AMG-706
AMG900
AMN107
amonafide
amuvatinib
anastrozole
anti-mesothelin iCasp9M28z CAR-
transduced autologous T lymphocytes
AP26113
apalutamide
apatinib
apatorsen
apicidin
apitolisib
APO866
arimidex
armala
aromasin
ARQ 736
ARQ-197
ASP3026
AT101
AT13148
AT13387
AT-406
AT7867
AT9283
atezolizumab
ATRA
AV 203
AV-951
avelumab
avicin D
AVL-292
axicabtagene ciloleucel
axitinib
AZ191
AZ628
AZ960
azacitidine
AZD0530
AZD1152-HQPA
AZD1208
AZD1480
AZD1775, MK1775
AZD2014
AZD2171
AZD-2281
AZD4547
AZD5069
AZD5363
AZD6244
AZD6482
AZD7451
AZD7762
AZD8055
AZD8186
AZD8330
AZD8931
bafetinib
barasertib
bax channel blocker
BAY 1187982
BAY1125976
BAY1143572
BAY-43-9006
BAY-73-4506
Bazedoxifene
BCL-LZH-4
belimumab
belinostat
bevacizumab
bexarotene
bextra
BEZ235
BGB-283
BGJ398, NVP-BGJ398
BGT226, NVP-BGT226
BI 836845
BI 847325
BI-2536
BIBF 1120
BIBR-1532
BIBW2992
bicalutamide
BIIB022
BIND-014
binimetinib
BIO
birabresib
BIRB-796
birinapant
BIX-01294
blinatumomab
BLZ945
BMN-673
BMS-195614
BMS-270394
BMS-345541
BMS-354825
BMS-387032
BMS-536924
BMS-582664
BMS-599626, AC480
BMS-690514, EVRI
BMS-708163
BMS-754807
BMS-777607
BMS-907351
BMS-911543
bortezomib
bosutinib
BRD0667
BRD3547
BRD4658
BRD4770
BRD6430
BRD6929
BRD9047
BRD9876
BRD-K11533227
BRD-K29313308
BRD-K51490254
BRD-K55478147
BRD-K61166597
BRD-K69840642
BRD-K81491172
BRD-K85133207
BRD-K88742110
brentuximab vedotin
briciclib
briciclib sodium
brigatinib
brilanestrant
brivanib
brontictuzumab
buparlisib
BVD-523
BX-795
BXL-628
BYL719
BYL-719
C6-ceramide
cabazitaxel
cabozantinib
CAL-101
camptosar
camptothecin
canakinumab
canertinib
capecitabine
carfilzomib
casodex
CAY10618
CBB-1007
CC-223
CCI-779
CD-1530
CD-437
CDK9 inhibitor 14
cediranib
cemiplimab-rwlc
cenisertib
CEP-701
ceritinib
cerubidine
cetuximab
CF102
CGP60474
Ch-55
Chembridge cat# 7667791
CHIR-265
CHIR-99021
CHR-2797
CHS-828
CI-1033
CI-1040
CI-994
ciclopirox olamine
Cimetidine
citarinostat
cixutumumab
clofarabine
clolar
cMet CAR-mRNA Electroporated
autologous T lymphocytes
cobimetinib
cometriq
compazine
compound 7d-cis
copanlisib
copanlisib hydrochloride
copper Cu 64-DOTA-trastuzumab
CP-358774
CPI-444
crenolanib
crizotinib
CS 7017, RS5444
CT 99021
CT53518
CT99021
CX-4945
cyanoquinoline 11
cyclopamine
CYT-387
dabrafenib
dabrafenib mesylate
dacomitinib
dactolisib
dalantercept
dalotuzumab
danusertib
daraprim
daratumumab
dasatinib
daunorubicin
daunorubicin hydrochloride
daunoxome
Debio 0932
Debio 1347, CH5183284
decadron
decitabine
defactinib
degarelix
denileukin diftitox
denintuzumab mafodotin
denosumab
depatuxizumab
depatuxizumab mafodotin
dexamethasone
dezapelisib
dinaciclib
dinutuximab
DMOT4039A
docetaxel
dociparstat sodium
doramapimod
dovitinib
doxil
doxorubicin
doxorubicin hydrochloride
DPD
duligotuzumab
durvalumab
dusigitumab
duvelisib
E7080
efudex
EGF816
EHT 1864
EHT 5372
elesclomol
ellence
elocalcitol
elotuzumab
emactuzumab
embelin
EMD 1214063, MSC2156119J
emibetuzumab
enasidenib
enasidenib mesylate
encorafenib
ENMD-0276
ENMD-2076
enobosarm
ensituximab
entinostat
entolimod
entospletinib
entrectinib
enzalutamide
enzastaurin
epacadostat
epidaza
epirubicin
epitinib
Eplerenone
EPZ004777 analog
EPZ-5676
EPZ-6438, E7438
erdafitinib
eribulin mesylate
erlotinib
erlotinib hydrochloride
estramustine
estramustine phosphate
estybon
etimoxir
etirinotecan pegol
Etomidate
etoposide
etoposide/etoposide phosphate
eulexin, apimid
everolimus
evista, keoxifene
EX-527
EXEL-2880
exemestane
fareston
faslodex
faz053
fedratinib
femara
ficlatuzumab
figitumumab
filanesib
fingolimod
firmagon
FK866
flavopiridol
fluorouracil
fluoxymesterone
flutamide
foretinib
fostamatinib
fruquintinib
FTY720
fulvestrant
futuximab
galeterone
galunisertib
gandotinib
ganetespib
ganitumab
GANT-61
GDC-0449
GDC-0623
GDC-0879
GDC-0941
gedatolisib
gefitinib
geldanamycin
gemcitabine
gemtuzumab ozogamicin
genasense
gilenya
gilteritinib
glasdegib
glasdegib maleate
glesatinib
glycooptimized trastuzumab-GEX
GMX-1778
GNF4877
goserelin
gossypol
GSK089
GSK1059615
GSK1070916
GSK1120212 (Trametanib)
GSK1210151A
GSK1363089
GSK2118436 (Dabrafenib)
GSK2256098
GSK-2636771
GSK269962A
GSK2879552
GSK3326595
GSK461364
GSK525762A
GSK-626616
GU 17
guadecitabine
GW 441756
GW 5074
GW2016
GW572016
GW786034
GW-843682X
HGS1036, FP-1039, GSK3052230
HKI-272
HLI-373
HMN-214
hycamptin
hycamtin
hydroxydaunorubicin
hydroxyurea
I-BET
I-BET151
ibritumomab tiuxetan
ibrutinib
IC-87114
icotinib
idamycin
idarubicin
idasanutlin
idelalisib
ilorasertib
imatinib
imatinib mesylate
imgatuzumab
imiquimod
INCB018424
INCB028060, INC280
INCB052793
INCB-18424
Indisulam
indoximod
inebilizumab
Infinity compound 1
iniparib
INK-1117
inotuzumab ozogamicin
interferon alfa-2b, recombinant
iobenguane I 131
ipafricept
ipatasertib
ipilimumab
irinotecan
irinotecan liposome
irinotecan trihydrochloride
isoliquiritigenin
ISOX
istiratumab
istradefylline
istubal
itacitinib
IV-2
ivosidenib
ixabepilone
ixazomib citrate
jakavi
JNJ-26854165
JNK Inhibitor VIII
JQ1
JTP-74057
JW74
Ketoconazole
Ki8751
KU-0059436
KU-0060648
KU-0063794
KW 2449
KW-6002
KX01
KX2-391
L-685458
lanreotide
lanreotide acetate
lapatinib
lapatinib ditosylate
larotrectinib sulfate
LB-100
LBH-589
LBW242
LE-135
lenalidomide
lenvatinib
lenvatinib mesylate
leptomycin b
lestaurtinib
letrozole
leucovorin
leuprolide
leuprolide acetate
leurocristine
LFM-A13/DDE-28
LGK974
linifanib
linsitinib
liposomal daunorubicin
liposomal doxorubicin
LJM716
lomeguatrib
loprox
lorlatinib
LOXO-101
lucitanib
luminespib
lupron
luspatercept
lutetium Lu 177-dotatate
LY-2157299
LY2510924
LY2874455
LY317615
LY450139
manumycin a
margetuximab
marinopyrrole a
maritoclax
masitinib
masivet
MDX-1105, BMS-936559
MEDI-3617
mercaptopurine
Merck60
methotrexate
methyltestosterone
Metyrapone
Metyrapone
MGCD-265
MH2075
midostaurin
mipsagargin
mirin
mirvetuximab soravtansine
Mitotane
mitoxantrone
MK-0457
MK-0752
MK-1775
MK-2206
MK-2461
MK5108
MK-8353, SCH900353
ML204
MLN2238
MLN-2480
MLN-4924
MLN518
MLN8237
MLN9708
MM_V_GSK_2d1
MM-111
MM-151
mocetinostat
modotuximab
mogamulizumab-kpkc
momelotinib
motesanib
motolimod
moxetumomab pasudotox-tdfk
MRK 003
MRK-560
MST-312
mubritinib
muparfostat
N9-isopropylolomoucine
naquotinib
navicixizumab
navitoclax
navoximod
necitumumab
nelarabine
neratinib
neratinib maleate
nesvacumab
N-hexanoyl-D-sphingosine
niclocide
niclosamide
nilandron, anandron
nilotinib
nilutamide
nimotuzumab
nintedanib
niraparib
niraparib tosylate monohydrate
nirogacestat
nivolumab
NMS-1286937
novantrone
novonex
NSC23766
NSC303580
NSC652287
NSC718781
NSC74859
NU-7441
nutlin-3
Nutlin-3a
NVP-ADW742
NVP-BEZ235
NVP-BGJ-398
NVP-BSK805
NVP-BYL-719
NVP-LDE225
NVP-TAE684
O-6-benzylguanine
obatoclax
obatoclax mesylate
obinutuzumab
oblimerson
ofatumumab
olaparib
olaratumab
olmutinib
omacetaxine mepesuccinate
omipalisib
ON-01910
onalespib
onartuzumab
Oncovin
Onivyde
OPB-31121
orantinib
OSI-027
OSI-774
OSI-906
OSI-930
osimertinib
ostarine
paclitaxel
pacritinib
palbociclib
pandacostat
panitumumab
panobinostat
patidegib
patritumab
pazopanib
pazopanib hydrochloride
PCI-32765
PD 153035
PD0325901
PD-0332991
PD-173074
PD318088
peginterferon alfa-2b
pelitinib
pembrolizumab
pemetrexed disodium
pentostatin
pertuzumab
pevonedistat
PF-01367338
PF-02341066
PF-03814735
PF-04217903
PF-184
PF-2341066
PF-4691502
PF-4708671
PF477736
PF-562271
PF-573228
PHA665752
PHA-793887
PI-103
pictilisib
pifithrin-mu
PIK-93
pilaralisib
PIM447
pimasertib
pluripotin
PLX3397, PLX108-01
PLX-4032
PLX4720
PLX-4720
PLX7486
pomalidomide
ponatinib
ponatinib hydrochloride
porfimer
poziotinib
pralatrexate
prexasertib
prochlorperazine
prochlorperazine dimaleate
PRT062070
PSMA ADC
purmorphamine
PWT33597
PX-12
PX-866
PXD-101
pyrimethamine
quizartinib
QW-BI-011
R-406
R428
rabusertib
radium 223 dichloride
RAF265
ralimetinib
raloxifene
ramucirumab
rapamune
rapamycin
rebastinib tosylate
refametinib
REGN1400
REGN421
regorafenib
relugolix
remetinostat
reparixin
Repligen 136
resminostat
retaspimycin
revatio
RG-108
RG7204
Ribavirin
ribociclib
ricolinostat
ridaforolimus (deforolimus)
rigosertib
rilotumumab
rimiducid
RITA
rituximab
rituximab and hyaluronidase human
rituximab/hyaluronidase human
RO-3306
RO4929097, R4733
RO5126766, CH5126766
RO5185426
RO5212054, PLX3603
rociletinib
romidepsin
roniciclib
rosomidnar
rucaparib
Rucaparib
rucaparib camsylate
ruxolitinib
ruxolitinib phosphate
S3I-201
SAHA
salermide
sapanisertib
SAR125844
SAR245409
SAR302503
SAR3419
SAR405838, MI-773
SAR650984
saracatinib
SB 216763
SB-225002
SB-431542
SB-505124
SB-525334
SB-743921
SC144
SCH 530348
SCH727965
SCH772984
SCH-79797
seliciclib
selinexor
selumetinib
semagacestat
SEN0014196
serdemetan
seribantumab
SF1126
SGC0946
SGX-523
sildenafil
silmitasertib
siltuximab
sipuleucel-T
sirolimus
sitagliptin
sitravatinib
SJ-172550
skepinone-L
SKI-606
SL 0101-1
SL 0101-1
SM-406
SN-38
SNS-032
SNS-314
SNX-2112
SNX-5422
sonidegib
sophoretin, quercetin
sorafenib
sorafenib tosylate
sotatercept
sotrastaurin
SP600125
Spironolactone
Spironolactone
SRT-1720
stelazine
STI571
streptozocin
SU11248
SU11274
sulfatinib
sunitinib
sunitinib malate
sutent
SZ4TA2
tagraxofusp-erzs
TAK-733
TAK901
taladegib
talazoparib
tamoxifen
tamoxifen citrate
tandutinib
tanespimycin
tanespymicin
tarextumab
targretin
TAS-119
taselisib
tasocitinib
taxol
taxotere
telatinib
telisotuzumab
temsirolimus
teniposide
TEW-7197
TG100-115
TG-101348
TGX-221
thalidomide
theliatinib
THM-I-91
tipifarnib
tipifarnib-P1
tipifarnib-P2
tisagenlecleucel
tisagenlecleucel-T
tivantinib
tivozanib
TL-32711
tocilizumab
tofacitinib
tofacitinib citrate
toposar, etopophos
topotecan
topotecan hydrochloride
toremifene
tosedostat
tositumomab
tositumomab and iodine i 131 tositumomab
tovetumab
tozasertib
trametinib
trastuzumab
trastuzumab emtansine
trebananib
trelstar
tretinoin
trifluoperazine
triptorelin
TSR-011
tubastatinA
tucatinib
tucidinostat
TW-37
tyverb
ublituximab
ulocuplumab
umbralisibtosylate
UNC0321
UNC0638
UNC0642
uprosertib
valdecoxib
valodex
valrubicin
valstar
vandetanib
vanucizumab
vargatef
vatalanib
veliparib
vemurafenib
vemurarinib
venetoclax
VER-155008
vesanoid
viagra
vinblastine sulfate
vincristine
vincristine sulfate
vinorelbine tartrate
vintafolide
vismodegib
VM-26
volasertib
volitinib
vorapaxar
vorinostat
voxtalisib
VS-4718
vumon
VX-680
VX-803
WH-4-025
WZ4002
WZ8040
X-396
X-82
XAV 939
XL019
XL184
XL228
XL281, BMS-908662
XL647, KD019
XL765
XL820
XL880
XL888
XMT-1522
Xtandi
YK 4-279
YM155
YM-155
zactima
zarnestra
ZD-1839
ZD6474
zebularine
zibotentan
ziv-aflibercept
ZM-447439
zoladex
ZSTK474
ZW25
zytiga

TABLE 3
Exemplary cancer therapeutic agents with associated targets.

| Target Gene | |
|---|---|
| Symbol | Drug Names (Development, Generic or Trade Name) |
| ABL1 | nilotinib (e.g., Tasigna ®, AMN107); ponatinib (e.g., Iclusig ®); cenisertib; AT9283; |
| | dasatinib (e.g., BMS-354825, Sprycel ®); bafetinib; bosutinib (e.g., Bosulif ®, SKI-606); |
| | imatinib (e.g., Gleevec ®); XL228saracatinib (AZD0530); regorafenib (e.g., Stivarga ®); |
| | KW 2449; imatinib mesylate (e.g., STI571) |
| ABL2 | dasatinib (e.g., BMS-354825, Sprycel ®) |
| ACPP | sipuleucel-T |
| (ACP3) | |
| ADA | pentostatin |
| ADORA2A | CPI-444; istradefylline (e.g., KW-6002) |
| ADORA3 | CF102 |
| AGXT | O-6-benzylguanine |
| AKT1 | cenisertib; AT13148; AZD5363; BAY1125976; ipatasertib; afuresertib; uprosertib; MK- |
| | 2206; AT7867; gefitinib (e.g., ZD-1839; Iressa ®); AKT inhibitor VIII |
| AKT2 | cenisertib; AT13148; AZD5363; BAY1125976; ipatasertib; afuresertib; uprosertib; MK- |
| | 2206; AT7867; AKT inhibitor VIII |
| AKT3 | cenisertib; AT13148; AZD5363; BAY1125976; ipatasertib; afuresertib; uprosertib; MK- |
| | 2206; AT7867; AKT inhibitor VIII |
| ALK | dalantercept; brigatinib (e.g., Alunbrig ®); gilteritinib (e.g., Xospata ®); ASP3026; alectinib |
| | (e.g., Alecensa ®); ceritinib (e.g., Zykadia ®); crizotinib (e.g., Xalkori ®); lorlatinib (e.g., |
| | Lorbrena ®); entrectinib; TSR-011; X-396 (ensartinib); AP26113; NVP-TAE684; PF- |
| | 2341066 |
| ANGPT1 | AMG 780; trebananib |
| ANGPT2 | AMG 780; MEDI-3617; nesvacumab; vanucizumab; trebananib |
| ANPEP | tosedostat; CHR-2797 |
| APH1A | MK0752; MRK 003; RO4929097; semagacestat; LY450139; L-685458; BMS-708163 |
| APH1B | MK0752; MRK 003; BMS-708163 |
| AR | enobosarm (Ostarine ®); nilutamide (e.g., Nilandron ®, Anandron ®); bicalutamide (e.g., |
| | Casodex ®); flutamide (e.g., Eulexin ®, Apimid); enzalutamide (e.g., Xtandi ®); galeterone; |
| | fluoxymesterone; methyltestosterone |
| ARAF | AZ628; MLN-2480 |
| ATR | VX-803 |
| AURKA | cenisertib; AT9283; ENMD-2076; MK5108; alisertib; PF-03814735; TAK901; TAS-119; |
| | ilorasertib; AMG900; BI 847325; danusertib; SNS-314; SNS 314; MLN8237; KW 2449; |
| | tozasertib; VX-680; MK-0457 |
| AURKB | cenisertib; AT9283; barasertib; GSK1070916; PF-03814735; ilorasertib; AMG900; BI |
| | 847325; danusertib; SNS-314; SNS 314; tozasertib; azd1152-HQPA; SL 0101-1; VX-680; |
| | MK-0457; BX-795; ZM-447439 |
| AURKC | GSK1070916; SNS 314; tozasertib; VX-680; MK-0457; BX-795 |
| AXL | gilteritinib; glesatinib; sitravatinib; R428 |
| B4GALNT1 | dinutuximab (e.g., Unituxin ®) |
| BAX | Bax channel blocker; BRD3547; gossypol |
| BCL2 | navitoclax; AT101; venetoclax (e.g., Venclexta ®); obatoclax; oblimerson (e.g., |
| | Genasense ®); rosomidnar; docetaxel (e.g., Taxotere ®); gossypol; TW-37; ABT-737; ABT- |
| | 199; Infinity compound 1; ABT-263; obatoclax mesylate |
| BCL2L1 | navitoclax; BCL-LZH-4; obatoclax; TW-37; SZ4TA2; ABT-737; ABT-263; obatoclax |
| | mesylate |
| BCL2L2 | navitoclax; ABT-737; ABT-263 |
| BIRC5 | YM155 |
| BLK | dasatinib (e.g., BMS-354825, Sprycel ®) |
| BMX | dasatanib (e.g., BMS-354825, Sprycel ®) |
| BRAF | ARQ 736; BGB-283; (dabrafenib, e.g., Tafinlar ®); vemurafenib (e.g., Zelboraf ®); |
| | RAF265; RO5212054, PLX3603; sorafenib (e.g., Nexavar ®, BAY-43-9006); regorafenib |
| | (e.g., Stivarga ®); encorafenib; MLN2480; RO5126766, CH5126766; XL281, BMS- |
| | 908662; AZ628; sorafenib tosylate; dabrafenib mesylate (e.g., GSK2118436); PLX-4720; |
| | MLN-2480; PLX-4032; RG7204; RO5185426; GDC-0879; CHIR-265 |
| BRD2 | birabresib; GSK525762A; I-BET; GSK1210151A; I-BET151; JQ1 |
| BRD3 | birabresib; GSK525762A; I-BET; GSK1210151A; I-BET151; JQ1 |
| BRD4 | birabresib; GSK525762A; I-BET; GSK1210151A; I-BET151; JQ1 |
| BTK | acalabrutinib; cenisertib; AVL-292; ibrutinib (e.g., Imbruvica ®, PCI-32765) dasatinib (e.g., |
| | Sprycel ® BMS-354825); LFM-A13/DDE-28 |
| CCND1 | briciclib; briciclib sodium |
| CCND2 | briciclib; briciclib sodium |
| CCND3 | briciclib; briciclib sodium |
| CD19 | inebilizumab; blinatumomab (e.g., Blincyto ®); SAR3419; denintuzumab mafodotin; |
| | tisagenlecleucel-T |
| CD274 | MDX-1105, BMS-936559; durvalumab; (e.g., Imfinzi ®); atezolizumab (e.g., Tecentriq ®); |
| | avelumab (e.g., Bavencio); FAZ053 |
| CD38 | daratumumab (e.g., Darzalex ®), HuMax-CD38; SAR650984 |
| CDK1 | alvocidib; roniciclib; dinaciclib; CGP60474; RO-3306; SCH727965; PHA-793887; |
| | flavopiridol; N9-isopropylolomoucine |
| CDK2 | alvocidib; roniciclib; dinaciclib; seliciclib; CGP60474; SCH727965; SNS-032; BMS- |
| | 387032; PHA-793887; flavopiridol |
| CDK4 | alvocidib; roniciclib; ribociclib (e.g., Kisqali ®); abemaciclib; palbociclib (e.g., Ibrance ®); |
| | PHA-793887; flavopiridol; PD-0332991 |
| CDK5 | alvocidib; dinaciclib; CGP60474; SCH727965; PHA-793887; N9-isopropylolomoucine |
| CDK6 | alvocidib; ribociclib (e.g., Kisqali ®); abemaciclib; palbociclib (e.g., Ibrance ®); |
| | flavopiridol; PD-0332991 |
| CDK7 | alvocidib; roniciclib; seliciclib; CGP60474; SNS-032; BMS-387032; PHA-793887 |
| CDK9 | alvocidib; roniciclib; dinaciclib; seliciclib; BAY1143572; CGP60474; SCH727965; CDK9 |
| | inhibitor 14; SNS-032; BMS-387032; PHA-793887 |
| CHD1 | epirubicin |
| CHEK1 | prexasertib; 681640; AZD7762; PF477736 |
| CHEK2 | rabusertib; AZD7762; PF477736 |
| CPT1A | etimoxir |
| CRBN | thalidomide; lenalidomide; pomalidomide |
| CRTC1 | AZD8055; sapanisertib; OSI-027; NVP-BEZ235 |
| CRTC2 | AZD8055; sapanisertib; OSI-027; NVP-BEZ235 |
| CSF1R | PLX3397, PLX108-01; PLX7486; emactuzumab; BLZ945; sunitinib malate (e.g., Sutent ®, |
| | SU11248); linifanib; ABT-869; pazopanib |
| CSNK2A1 | silmitasertib; CX-4945 |
| CSNK2A2 | silmitasertib; CX-4945 |
| CXCR1 | reparixin |
| CXCR2 | AZD5069; reparixin; SB-225002 |
| CXCR4 | ulocuplumab; LY2510924; dociparstat sodium |
| CYP17A1 | abiraterone acetate (e.g., Zytiga ®) |
| CYP19A1 | letrozole (e.g., Femara ®); exemestane (e.g., Aromasin ®); anastrozole (e.g., Arimidex ®) |
| CYP11B1 | Metyrapone; Mitotane; Ketoconazole; Spironolactone; Cimetidine |
| CYP11B2 | Eplerenone; Etomidate; Metyrapone; Spironolactone |
| DDR2 | regorafenib (e.g., Sitravatinib ®) |
| DHFR | methotrexate; pemetrexed disodium; pralatrexate; abitrexate |
| DHH | glasdegib; vismodegib (e.g., Erivedge ®) |
| DHX9 | YK 4-279 |
| DNMT1 | guadecitabine; azacitidine; decitabine; zebularine; RG-108 |
| DOT1L | EPZ-5676; EPZ004777 analog; SGC0946 |
| DPP4 | sitagliptin |
| DRD2 | prochlorperazine; prochlorperazine dimaleate (e.g., Compazine ®); trifluoperazine (e.g., |
| | Stelazine ®) |
| DYRK1A | EHT 5372; GNF4877; AZ191 |
| DYRK1B | EHT 5372; GNF4877; AZ191 |
| DYRK2 | GSK-626616 |
| DYRK3 | GSK-626616 |
| DYRK4 | GSK-626616 |
| EDNRA | Zibotentan |
| EGFR | AEE788, NVP-AEE788; brigatinib (e.g., Alunbrig ®); naquotinib; vandetanib (e.g., |
| | Zactima ®, Caprelsa ®); osimertinib (e.g., Tagrisso ®); BGB-283; afatinib (e.g., Gilotrif ™, |
| | Tomtovok ®, BIBW2992); icotinib; canertinib; rociletinib; EGF816; olmutinib; epitinib; |
| | theliatinib; erlotinib (e.g., Tarceva ®); XL647, KD019; gefitinib (e.g., Iressa ®); AZD8931; |
| | BMS-599626, AC480; modotuximab; depatuxizumab; panitumumab (e.g., Vectibix ®); |
| | nimotuzumab; necitumumab (e.g., Portrazza ™); cetuximab (e.g., Erbitux ®); |
| | duligotuzumab; MM-151; imgatuzumab; futuximab; depatuxizumab mafodotin; AMG 595; |
| | aldesleukin (e.g., Proleukin ®); lapatinib (e.g., Tykerb ®); osimertinib (e.g., Tagrisso ®); |
| | AP26113; dacomitinib; erlotinib hydrochloride; lapatinib ditosylate; cyanoquinoline 11; |
| | GW572016; GW2016; Tyverb; PD 153035; CI-1033; ZD-1839; CP-358774; OSI-774; |
| | NSC718781; WZ4002; WZ8040; neratinib; HKI-272 |
| EHMT1 | UNC0638; UNC0642 |
| EHMT2 | BIX-01294; QW-BI-011; BRD4770; UNC0321; UNC0638; UNC0642 |
| EIF4E | 4EGI-1; Ribavirin |
| EPHA2 | regorafenib; dasatinib (e.g., BMS-354825, Sprycel ®); vandetanib |
| EPHB4 | sitravatinib; XL647, KD019; vandetanib |
| ERBB2 | tucatinib; BMS-690514, EVRI; AEE788, NVP-AEE788; afatinib (e.g., Gilotrif ™, |
| | Tomtovok ®, BIBW2992); canertinib; lapatinib (e.g., Tykerb ®); neratinib (e.g., Nerlynx ®); |
| | mubritinib; XL647, KD019; glycooptimized trastuzumab-GEX; margetuximab; MM-111; |
| | pertuzumab (e.g., Perjeta ®, Omnitarg ®); trastuzumab (e.g., Herceptin ®); ado trastuzumab |
| | emtansine (e.g., Kadcyla ®); XMT-1522; ZW25; copper Cu 64-DOTA-trastuzumab; |
| | aldesleukin (e.g., Proleukin ®); dacomitinib; lapatinib ditosylate; GW572016; GW2016; |
| | Tyverb; CI-1033; erlotinib (e.g., Tarceva ®); CP-358774; OSI-774; NSC718781; HKI-272; |
| | AZD8931; vandetanib |
| ERBB3 | afatinib (e.g., Gilotrif ™); AV 203; LJM716; duligotuzumab; MM-111; seribantumab; |
| | istiratumab; REGN1400; patritumab; dacomitinib; AZD8931; vandetanib |
| ERBB4 | pelitinib; poziotinib; dacomitinib; afatinib; (e.g., Gilotrif ™); vandetanib |
| ESR1 | fulvestrant (e.g., Faslodex ®); tamoxifen; tamoxifen citrate (e.g., Nolvadex ®, Istubal, |
| | Valodex, Soltamox ™); raloxifene (e.g., Evista ®, Keoxifene); toremifene (e.g., Fareston ®); |
| | brilanestrant; galeterone; fluoxymesterone; estramustine |
| ESR2 | fulvestrant (e.g., Faslodex ®); tamoxifen; tamoxifen citrate (e.g., Nolvadex ®, Istubal, |
| | Valodex, Soltamox ™); raloxifene (e.g., Evista ®), Keoxifene); toremifene (e.g., Fareston ®); |
| | brilanestrant; galeterone; estramustine; estramustine phosphate |
| EZH2 | EPZ-6438, E7438; MM_V_GSK_2d1; QW-BI-011; BRD4770 |
| F2R | SCH-79797; vorapaxar; SCH-530348 |
| FCGR1A | porfimer |
| FGF1 | muparfostat; pazopanib hydrochloride |
| FGF2 | muparfostat |
| FGFR1 | masitinib; ponatinib (e.g., Iclusig ®); AZD4547; BGJ398, NVP-BGJ398; nintedanib (e.g., |
| | Vargatef ®, BIBF 1120); Debio 1347, CH5183284; lucitanib; sulfatinib; LY2874455; |
| | dovitinib; XL228; erdafitinib; orantinib; HGS1036, FP-1039, GSK3052230; sorafenib |
| | tosylate; regorafenib; PD-173074; lenvatinib; pazopanib |
| FGFR2 | masitinib; ponatinib (e.g., Iclusig ®); AZD4547; BGJ398, NVP-BGJ398; nintedanib (e.g., |
| | Vargatef ®, BIBF 1120); Debio 1347, CH5183284; lucitanib; sulfatinib; LY2874455; |
| | dovitinib; XL228; erdafitinib; BAY 1187982; regorafenib; Ki8751 |
| FGFR3 | masitinib; ponatinib (e.g., Iclusig ®); AZD4547; BGJ398, NVP-BGJ398; nintedanib (e.g., |
| | Vargatef ®, BIBF 1120); Debio 1347, CH5183284; lucitanib; sulfatinib; LY2874455; |
| | dovitinib; XL228; erdafitinib; ENMD-2076; NVP-BGJ-398; pazopanib hydrochloride; |
| | masivet; PD-173074; pazopanib |
| FGFR4 | erdafitinib; NVP-BGJ-398; nintedanib |
| FGR | dasatinib (e.g., BMS-354825, Sprycel ®) |
| FKBP1A | Rimiducid |
| FLT1 | ilorasertib; axitinib (e.g., Inlyta ®); motesanib; regorafenib (e.g., Stivarga ®, BAY-73-4506); |
| | nintedanib (e.g., Vargatef ®, BIBF 1120); lucitanib; pazopanib (e.g., Votrient ®, |
| | GW786034, Armala ™); fruquintinib; tivozanib; glesatinib; sitravatinib; sorafenib tosylate; |
| | sunitinib malate; pazopanib hydrochloride; sunitinib (e.g., Sutent ®, SU11248); MGCD- |
| | 265; cediranib; AZD2171; linifanib; ABT-869 |
| FLT3 | quizartinib; ponatinib (e.g., Iclusig ®); cenisertib; gilteritinib; sorafenib (e.g., Nexavar ®, |
| | BAY-43-9006); lestaurtinib; crenolanib; ENMD-0276; tandutinib; amuvatinib; midostaurin |
| | (e.g., Rydapt ®); PLX3397, PLX108-01; sunitinib malate (e.g., Sutent ®, SU11248); |
| | cabozantinib (e.g., Cabometyx ® (tablet), Cometriq ® (capsule)); tozasertib; AZD1152- |
| | HQPA; sorafenib tosylate; KW 2449; XL184; BMS-907351; MLN518; CT53518; AC220; |
| | linifanib; ABT-869; CEP-701 |
| FLT4 | ilorasertib; axitinib (e.g., Inlyta ®); motesanib; regorafenib (e.g., Stivarga ®, BAY-73-4506; |
| | nintedanib (e.g., Vargatef ®, BIBF 1120); lucitanib; pazopanib (e.g., Votrient ®, |
| | GW786034, Armala); fruquintinib; tivozanib; glesatinib; sitravatinib; telatinib; sorafenib |
| | tosylate; sunitinib malate (e.g., Sutent ®, SU11248); pazopanib hydrochloride; sorafenib |
| | (e.g., BAY-43-9006, Nexavar ®); AG013736; lenvatinib; E7080; MGCD-265; cediranib; |
| | AZD2171 |
| FNTA | tipifarnib; Zarnestra; tipifarnib-P2; tipifarnib-P1; manumycin A |
| FOLH1 | PSMA ADC; mipsagargin; BIND-014 |
| FOLR1 | mirvetuximab soravtansine; vintafolide |
| FOLR2 | vintafolide |
| FOLR3 | vintafolide |
| FRK | regorafenib; dasatinib (e.g., BMS-354825, Sprycel ®) |
| FYN | dasatinib (e.g., BMS-354825, Sprycel ®) |
| FZD8 | ipafricept |
| GART | pemetrexed disodium |
| GNRH1 | Degarelix (e.g., Firmagon ®); leuprolide (e.g., Lupron ®); triptorelin (e.g., Trelstar ®); |
| | goserelin (e.g., Zoladex ®); relugolix |
| GNRHR | goserelin; leuprolide acetate; abarelix; degarelix |
| GSK3A | CT 99021; CHIR-99021; CT99021; SB 216763 |
| GSK3B | CT 99021; BIO; 6-bromoindirubin-3′-oxime; 6BIO; CHIR-99021; CT99021; JW74; BRD- |
| | K81491172; SB 216763 |
| HCK | dasatinib (e.g., BMS-354825, Sprycel ®); bosutinib |
| HDAC1 | resminostat; citarinostat; abexinostat; romidepsin (e.g., Istodax); tucidinostat; Epidaza ®; |
| | panobinostat (e.g., Farydak ®, Faridak); mocetinostat; vorinostat (e.g., Zolinza); entinostat; |
| | belinostat (e.g., Beleodaq ®); remetinostat; THM-I-91; LBH-589; Merck60; BRD6929; |
| | BRD-K11533227; PXD-101; pandacostat; CI-994; BRD-K61166597; apicidin; SAHA; |
| | BRD-K85133207 |
| HDAC10 | vorinostat (e.g., Zolinza ®) |
| HDAC11 | vorinostat (e.g., Zolinza ®) |
| HDAC2 | resminostat; citarinostat; abexinostat; romidepsin (e.g., Istodax ®); tucidinostat; Epidaza ®; |
| | panobinostat (e.g., Farydak ®, Faridak); mocetinostat; vorinostat (e.g., Zolinza ®); |
| | entinostat; belinostat (e.g., Beleodaq ®); remetinostat; romidepsin; THM-I-91; LBH-589; |
| | Merck60; BRD6929; BRD-K11533227; PXD-101; pandacostat; CI-994; BRD-K61166597; |
| | apicidin; SAHA |
| HDAC3 | resminostat; citarinostat; abexinostat; romidepsin (e.g., Istodax ®); tucidinostat; Epidaza ®; |
| | panobinostat (e.g., Farydak ®, Faridak); mocetinostat; vorinostat (e.g., Zolinza ®); |
| | entinostat; belinostat (e.g., Beleodaq); remetinostat; THM-I-91; LBH-589; PXD-101; BRD- |
| | K29313308; pandacostat; Repligen 136; CI-994; apicidin; SAHA |
| HDAC4 | vorinostat (e.g., Zolinza ®); belinostat; panobinostat; romidepsin |
| HDAC5 | vorinostat (e.g., Zolinza ®); belinostat; panobinostat; romidepsin |
| HDAC6 | resminostat; citarinostat; abexinostat; romidepsin (e.g., Istodax ®); tucidinostat; Epidaza ®; |
| | panobinostat (e.g., Farydak ®, Faridak); mocetinostat; vorinostat (e.g., Zolinza ®); |
| | entinostat; belinostat (e.g., Beleodaq ®); remetinostat; ricolinostat; tubastatin A; THM-I-91; |
| | LBH-589; PXD-101; pandacostat; BRD-K51490254; CI-994; BRD-K55478147; apicidin; |
| | ISOX; BRD-K69840642; SAHA |
| HDAC7 | vorinostat (e.g., Zolinza ®); belinostat; panobinostat; romidepsi |
| HDAC8 | vorinostat (e.g., Zolinza ®); panobinostat; THM-I-91; LBH-589; belinostat; PXD-101; |
| | pandacostat; BRD-K51490254; CI-994; apicidin; entinostat; SAHA; BRD-K88742110; |
| | romidepsin |
| HDAC9 | vorinostat (e.g., Zolinza ®); belinostat; panobinostat; romidepsin |
| HPRT1 | mercaptopurine |
| HPSE | muparfostat |
| HSP90AA1 | tanespimycin; onalespib; luminespib; Debio 0932; retaspimycin; SNX-5422; ganetespib; |
| | XL888; geldanamycin; AT13387; SNX-2112; tanespymicin; 17-AAG |
| HSPA1A | elesclomol; VER-155008; pifithrin-mu; NSC303580 |
| HSPA1B | elesclomol; VER-155008; pifithrin-mu; NSC303580 |
| HSPB1 | apatorsen |
| IDH1 | ivosidenib; ML204; MH2075 |
| IDH2 | enasidenib (e.g., Idhifa ®) |
| IDO1 | epacadostat; navoximod; indoximod |
| IFNAR1 | interferon alfa-2b, recombinant; peginterferon alfa-2b |
| IFNAR2 | interferon alfa-2b, recombinant; peginterferon alfa-2b |
| IGF1R | BMS-536924; BMS-754807; linsitinib; XL228; ganitumab; BI 836845; BIIB022; |
| | figitumumab; cixutumumab; dusigitumab; dalotuzumab; istiratumab; AEW541; NVP- |
| | ADW742; OSI-906 |
| IHH | glasdegib; vismodegib (e.g., Erivedge ®) |
| IKBKB | PF-184; BMS-345541 |
| IL1B | canakinumab (e.g., Ilaris ®) |
| IL2RA | aldesleukin; denileukin diftitox |
| IL2RB | aldesleukin; denileukin diftitox |
| IL2RG | aldesleukin; denileukin diftitox |
| IL6 | Siltuximab (e.g., Sylvant ®) |
| IL6R | Tocilizumab (e.g., Actemra ®) |
| IL6ST | Bazedoxifene; SC144 |
| INHA | sotatercept |
| INHBA | sotatercept |
| INHBB | sotatercept |
| INHBC | sotatercept |
| INHBE | sotatercept |
| ITK | pazopanib hydrochloride; pazopanib |
| JAK1 | PRT062070; itacitinib; INCB052793; AZD1480; momelotinib; ruxolitinib (e.g., Jakafi ®, |
| | Jakavi, INCB018424); ruxolitinib phosphate; BIO; 6-bromoindirubin-3′-oxime (6BIO); |
| | CYT-387; INCB-18424 |
| JAK2 | AZD1480; momelotinib; ruxolitinib (e.g., Jakafi ®, INCB018424, Jakavi); AT9283; BMS- |
| | 911543; lestaurtinib; fedratinib; pacritinib; XL019; gandotinib; AZD1152-HQPA; AZ960; |
| | ruxolitinib phosphate; NVP-BSK805; BIO; 6-bromoindirubin-3′-oxime (6BIO); TG- |
| | 101348; SAR302503; CYT-387; CEP-701; INCB-18424 |
| JAK3 | tofacitinib citrate (e.g., Xeljanz ®); PRT062070; tasocitinib; BIO; 6-bromoindirubin-3′- |
| | oxime (6BIO) |
| KDM1A | GSK2879552; CBB-1007 |
| KDR | linifanib; ENMD-2076; foretinib; sulfatinib; vatalanib; orantinib; X-82; XL647, KD019; |
| | ilorasertib; axitinib (e.g., Inlyta ®); motesanib; regorafenib (e.g., Stivarga ®, BAY-73-4506); |
| | nintedanib (e.g., Vargatef ®, BIBF 1120); lucitanib; pazopanib (e.g., Votrient ®, armala, |
| | GW786034); fruquintinib; tivozanib; glesatinib; sitravatinib; AEE788, NVP-AEE788; |
| | ponatinib (e.g., Iclusig ®); cediranib; vandetanib (e.g., Zactima ™, Caprelsa ®, ZD6474); |
| | sorafenib (e.g., Nexavar ®, BAY-43-9006); brivanib; BMS-690514, EVRI; rebastinib |
| | tosylate; lenvatinib (e.g., Lenvima ®); midostaurin (e.g., Rydapt ®); RAF265; sunitinib (e.g., |
| | Sutent ®, SU11248); cabozantinib (e.g., Cabometyx ® (tablet), Cometriq ® (capsule)); |
| | XL820; apatinib; telatinib; ramucirumab (e.g., Cyramza ®); sorafenib tosylate; sunitinib |
| | malate; pazopanib hydrochloride; thalidomide; XL880; EXEL-2880; GSK1363089; |
| | GSK089; OSI-930; BMS-582664; AG013736; E7080; Ki8751; XL184; BMS-907351; |
| | AV-951; BRD4658; MGCD-265; AZD2171; CHIR-265; ABT-869 |
| KIF11 | filanesib; SB-743921 |
| KIT | masitinib; axitinib (e.g., Inlyta ®); motesanib; cenisertib; telatinib; regorafenib (e.g., |
| | Stivarga ®, BAY-73-4506); dasatinib (e.g., BMS-354825, Sprycel ®); pazopanib (e.g., |
| | Votrient ®, GW786034, armala); sitravatinib; tandutinib; amuvatinib; midostaurin (e.g., |
| | Rydapt ®); PLX3397, PLX108-01; imatinib (e.g., Gleevec ®); sunitinib malate (e.g., |
| | Sutent ®, SU11248); cabozantinib (e.g., Cabometyx ® (tablet), Cometriq ® (capsule)); |
| | XL820; sorafenib (e.g., Nexavar ®); midostaurin; sorafenib tosylate; pazopanib |
| | hydrochloride; sorafenib (e.g., BAY-43-9006, Nexavar ®); Ki8751; cabozantinib (e.g., |
| | Cometriq ®); XL184; BMS-907351; Masivet; nilotinib (e.g., AMN107, Tasigna ®); |
| | MLN518; CT53518; AMG-706; imatinib; lenvatinib; ponatinib |
| KRAS | BGB-283 |
| LAP3 | tosedostat; CHR-2797 |
| LCK | dasatinib (e.g., BMS-354825, Sprycel ®); pazopanib |
| LDLR | porfimer |
| LHCGR | goserelin |
| LIMK1 | dabrafenib |
| LYN | bafetinib; cenisertib; dasatinib (e.g., BMS-354825, Sprycel ®); bosutinib; ponatinib |
| MAPIA | estramustine |
| MAP2 | estramustine |
| MAP2K1 | pimasertib; selumetinib; AZD8330; refametinib; BI 847325; CI-1040; GDC-0623; |
| | cobimetinib (e.g., Cotellic ®); trametinib (e.g., Mekinist ®, GSK1120212); binimetinib; |
| | PD0325901, RO5126766, CH5126766; TAK-733; PD318088; GSK1120212; JTP-74057; |
| | AZD6244 |
| MAP2K2 | pimasertib; selumetinib; AZD8330; refametinib; BI 847325; CI-1040; GDC-0623; |
| | cobimetinib (e.g., Cotellic ®); trametinib (e.g., Mekinist ®); binimetinib; PD0325901; |
| | RO5126766, CH5126766; TAK-733; PD318088; GSK1120212; JTP-74057; AZD6244; |
| | GSK1120212 |
| MAP3K7 | (5Z)-7-Oxozeaenol |
| MAP3K8 | cyanoquinoline 11 |
| MAPK1 | BVD-523; ralimetinib; MK-8353, SCH900353; N-hexanoyl-D-sphingosine; C6-ceramide; |
| | SCH772984 |
| MAPK11 | regorafenib |
| MAPK14 | BIRB-796; doramapimod; skepinone-L; BIRB 0796 |
| MAPK3 | pluripotin; SCH772984 |
| MAPK8 | SP600125; BIRB 0796; JNK Inhibitor VIII |
| MAPK9 | SP600125 |
| MCL1 | navitoclax; obatoclax; marinopyrrole a; maritoclax; obatoclax mesylate |
| MDM2 | SAR405838, MI-773; idasanutlin; nutlin-3; RITA; NSC652287; HLI-373; DPD; JNJ- |
| | 26854165; serdemetan; SJ-172550; Nutlin-3a |
| MET | sitravatinib; AMG 208; AMG 337; tivantinib; BMS-777607; EMD 1214063, |
| | MSC2156119J; foretinib; volitinib; INCB028060, INC280; glesatinib; MK-2461; |
| | amuvatinib; crizotinib (e.g., Xalkori ®); PF-04217903; SAR125844; cabozantinib (e.g., |
| | Cabometyx ® (tablet), Cometriq ® (capsule)); rilotumumab; ficlatuzumab; telisotuzumab; |
| | emibetuzumab; onartuzumab; cMet CAR-mRNA Electroporated autologous T |
| | lymphocytes; MGCD-265; PHA665752; SU11274; XL880; EXEL-2880; GSK1363089; |
| | GSK089; SGX-523; OSI-930; ARQ-197; XL184; BMS-907351; PF-2341066; PF- |
| | 02341066 |
| MGMT | Lomeguatrib |
| MRE11 | Mirin |
| MS4A1 | obinutuzumab (e.g., Gazyvaro ®, Gazyva ®); rituximab (e.g., Rituxan ®, Mabthera ®); |
| | ibritumomab tiuxetan (e.g., Zevalin ®); ublituximab; ofatumumab (e.g., Arzerra ®, HuMax- |
| | CD20); rituximab/hyaluronidase human (e.g., Rituxan Hycela); rituximab (e.g., Rituxan ®, |
| | Mabthera); tositumomab (e.g., Bexxar ®); tositumomab and Iodine I 131 tositumomab; |
| | ofatumumab; obinutuzumab |
| MSLN | DMOT4039A; anti-mesothelin iCasp9M28z CAR-transduced autologous T lymphocytes; |
| | amatuximab |
| MST1R | Glesatinib |
| MTOR | ridaforolimus (deforolimus); sirolimus (e.g., Rapamune ®); AZD2014; AZD8055; |
| | dactolisib; BGT226, NVP-BGT226; CC-223; temsirolimus (e.g., Torisel ®); apitolisib; |
| | sapanisertib; OSI-027; PF-4691502; PI-103; gedatolisib; PWT33597; everolimus (e.g., |
| | Afinitor ®); SF1126; voxtalisib; BEZ235; GSK1059615; CCI-779; NVP-BEZ235; KU- |
| | 0063794; XL765; SAR245409; rapamycin |
| MUC5AC | ensituximab |
| NAE1 | pevonedistat; MLN-4924 |
| NAMPT | GMX-1778; CHS-828; APO866; FK866; BRD0667; CAY10618 |
| NBN | Rucaparib; AG014699; PF-01367338; AG-014699 |
| NCSTN | MK-0752; RO4929097; semagacestat; LY450139; L-685458 |
| NEK11 | dabrafenib |
| NOTCH1 | brontictuzumab; MK0752; tarextumab; nirogacestat; REGN421; RO4929097, R4733 |
| NOTCH2 | MK0752; tarextumab; nirogacestat; REGN421; RO4929097, R4733 |
| NOTCH3 | MK0752; tarextumab; nirogacestat; REGN421; RO4929097, R4733 |
| NOTCH4 | MK0752; tarextumab; nirogacestat; REGN421; RO4929097, R4733 |
| NPEPPS | tosedostat; CHR-2797 |
| NR3C1 | fluoxymesterone; avicin D; dexamethasone (e.g., Decadron ®) |
| NRAS | BGB-283 |
| NTRK1 | AZD7451; LOXO-101; sitravatinib; PLX7486; entrectinib; TSR-011; lestaurtinib; |
| | regorafenib; CEP-701; GW 441756 |
| NTRK2 | AZD7451; LOXO-101; sitravatinib; PLX7486; entrectinib; TSR-011 |
| NTRK3 | AZD7451; LOXO-101; sitravatinib; PLX7486; entrectinib; TSR-011 |
| PARP1 | veliparib; rucaparib (e.g., Rubraca ®); olaparib (e.g., Lynparza ®); talazoparib; iniparib; |
| | niraparib (e.g., Zejula ®); rucaparib camsylate; AZD-2281; KU-0059436; NVP-LDE225; |
| | BRD6430; ABT-888; BMN-673 |
| PARP2 | veliparib; rucaparib (e.g., Rubraca ®); olaparib (e.g., Lynparza ®); talazoparib; iniparib; |
| | niraparib (e.g., Zejula ®); rucaparib camsylate; AZD-2281; KU-0059436; NVP-LDE225; |
| | BRD6430; ABT-888; BMN-673 |
| PARP3 | veliparib; rucaparib (e.g., Rubraca ®); olaparib (e.g., Lynparza ®); talazoparib; iniparib; |
| | niraparib (e.g., Zejula ®); rucaparib camsylate |
| PDE5A | Sildenafil (e.g., Viagra ®, Revatio ®) |
| PDGFRA | ilorasertib; motesanib; nintedanib (e.g., Vargatef ®, BIBF 1120); pazopanib (e.g., Votrient); |
| | sitravatinib; tandutinib; imatinib (e.g., Gleevec); X-82; crenolanib; amuvatinib; midostaurin |
| | (e.g., Rydapt ®); olaratumab (e.g., Lartruvo ®); tovetumab; sorafenib (e.g., Nexavar ®); |
| | sunitinib malate; pazopanib hydrochloride; regorafenib; Ki8751; masitinib (e.g., Masivet ®); |
| | AMG-706; axitinib |
| PDGFRB | ilorasertib; motesanib; nintedanib (e.g., Vargatef ®, BIBF 1120); pazopanib (e.g., |
| | Votrient ®, GW786034, armala); sitravatinib; tandutinib; imatinib (e.g., Gleevec ®); X-82; |
| | linifanib; axitinib (e.g., Inlyta ®); sorafenib (e.g., Nexavar ®); telatinib; regorafenib (e.g., |
| | Stivarga ®, BAY-43-9006); sunitinib (e.g., Sutent ®, SU11248); orantinib; XL820; |
| | midostaurin; sorafenib tosylate; sunitinib malate; pazopanib hydrochloride; dasatinib (e.g., |
| | BMS-354825, Sprycel ®); masitinib (e.g., Masivet ®); MLN518; CT53518; ABT-869; |
| | AMG-706 |
| PGF | ziv-aflibercept (e.g., Zaltrap ®) |
| PIGF | ziv-aflibercept (e.g., Zaltrap ®) |
| PIK3CA | copanlisib; dactolisib; BGT226, NVP-BGT226; buparlisib; alpelisib; pictilisib; apitolisib; |
| | omipalisib; GSK2636771; PF-4691502; PI-103; gedatolisib; PWT33597; PX-866; SF1126; |
| | pilaralisib; voxtalisib; sophoretin, quercetin; taselisib; INK-1117; BEZ235; GDC0941; |
| | NVP-BYL-719; GSK1059615; NVP-BEZ235; BYL-719; XL765; SAR245409 |
| PIK3CB | AZD8186; BEZ235; GDC0941; TGX-221; GSK1059615; NVP-BEZ235; GSK-2636771; |
| | AZD6482; PI-103; XL765; SAR245409 |
| PIK3CD | Idelalisib (e.g., Zydelig ®); dezapelisib; umbralisib tosylate; duvelisib; GDC0941; |
| | GSK1059615; BEZ235; NVP-BEZ235; CAL-101; TG100-115; PI-103; XL765; |
| | SAR245409; IC-87114 |
| PIK3CG | AZD8186; duvelisib; GDC0941; GSK1059615; BEZ235; NVP-BEZ235; PIK-93; |
| | ZSTK474; TG100-115; PI-103; XL765; SAR245409 |
| PIM1 | AZD1208; PIM447 |
| PIM2 | AZD1208; PIM447 |
| PIM3 | AZD1208; PIM447; SL 0101-1 |
| PLK1 | volasertib; BI 2536; GSK461364; NMS-1286937; rigosertib (e.g., Estybon ®, ON-01910); |
| | LFM-A13/DDE-28; Novonex; HMN-214; GW-843682X |
| PLK2 | BI-2536; LFM-A13/DDE-28 |
| PLK3 | BI-2536; LFM-A13/DDE-28; GW-843682X |
| POLA1 | clofarabine (e.g., Clolar ®); nelarabine |
| PORCN | LGK974 |
| PPARG | CS 7017, RS5444 |
| PPP2CA | LB-100; N-hexanoyl-D-sphingosine; C6-ceramide |
| PRKCA | sophoretin, quercetin; enzastaurin; midostaurin (e.g., Rydapt ®) |
| PRKCB | sophoretin, quercetin; enzastaurin; sotrastaurin; AEB071; LY317615 |
| PRKCE | sophoretin, quercetin; enzastaurin |
| PRKCG | sophoretin, quercetin; enzastaurin |
| PRKCI | Gossypol |
| PRKDC | KU-0060648; PI-103; NU-7441 |
| PRLR | Fluoxymesterone |
| PSEN1 | MK-0752; RO4929097; semagacestat; LY450139; L-685458 |
| PRMT5 | GSK3326595 |
| PSEN1 | MRK-560 |
| PSENEN | MK0752; MRK 003; RO4929097; semagacestat; LY450139; L-685458; BMS-708163 |
| PSMB1 | bortezomib (e.g., Velcade ®); carfilzomib |
| PSMB10 | Carfilzomib |
| PSMB2 | bortezomib; carfilzomib |
| PSMB5 | bortezomib (e.g., Velcade ®); carfilzomib; MLN2238; MLN9708 |
| PSMB8 | Carfilzomib |
| PSMB9 | Carfilzomib |
| PSMD1 | Bortezomib |
| PSMD2 | Bortezomib |
| PTCH1 | vismodegib (e.g., Erivedge ®) |
| PTGS2 | valdecoxib (e.g., Bextra ®) |
| PTK2 | masitinib; GSK2256098; VS-4718; defactinib; PF-573228; PF-562271 |
| PTK6 | Vandetanib |
| RAC1 | NSC23766; EHT 1864 |
| RAD50 | Mirin |
| RAF1 | sorafenib (e.g., Nexavar ®); regorafenib (e.g., Stivarga ®, BAY-73-4506); encorafenib; |
| | MLN2480; RO5126766, CH5126766; XL281, BMS-908662; RAF265; AZ628; GW 5074; |
| | sorafenib tosylate; dabrafenib |
| RARA | alitretinoin; AM-580; BMS-195614; ATRA; all-trans retinoic acid; tretinoin (e.g., |
| | Vesanoid ®); Ch-55 |
| RARB | alitretinoin; LE-135; AM-580; BMS-195614; ATRA; all-trans retinoic acid; tretinoin (e.g., |
| | Vesanoid ®); Ch-55; AC55649 |
| RARG | alitretinoin; BMS-270394; AM-580; CD-1530; CD-437; AHPN; BMS-195614; ATRA; all- |
| | trans retinoic acid; tretinoin (e.g., Vesanoid ®); Ch-55 |
| RBM39 | Indisulam |
| RET | motesanib; vandetanib (e.g., Zactima ™, Caprelsa ®); sorafenib (e.g., Nexavar ®); |
| | regorafenib (e.g., Stivarga ®, BAY-73-4506); sitravatinib; amuvatinib; sunitinib (e.g., |
| | Sutent ®, SU11248); cabozantinib (e.g., Cabometyx ® (tablet), Cometriq ® (capsule)); |
| | AZD1152-HQPA; lestaurtinib; sorafenib tosylate; AMG-706; CEP-701; lenvatinib |
| RICTOR | OSI-027 |
| ROCK1 | GSK269962A |
| ROCK2 | GSK269962A |
| ROS1 | crizotinib (e.g., Xalkori ®); lorlatinib; entrectinib |
| RPL3 | omacetaxine mepesuccinate |
| RPS6KB1 | AT13148; PF-4708671 |
| RPTOR | OSI-027 |
| RRM1 | gemcitabine; Hydroxyurea; ciclopirox olamine (e.g., Loprox ®); clofarabine (e.g., Clolar ®) |
| RXRA | alitretinoin; bexarotene; targretin |
| RXRB | alitretinoin; bexarotene; targretin |
| RXRG | alitretinoin; bexarotene; targretin |
| S1PR1 | fingolimod (e.g., FTY720, Gilenya ®) |
| SH2B3 | pazopanib hydrochloride |
| SHH | glasdegib; vismodegib (e.g., Erivedge) |
| SIK1 | dabrafenib |
| SIRT1 | salermide; isoliquiritigenin; GU 17; SRT-1720; EX-527; SEN0014196 |
| SLAMF7 | elotuzumab (e.g., Empliciti ®) |
| SLC2A2 | streptozocin |
| SMO | vismodegib (e.g., Erivedge ®); patidegib; sonidegib (e.g., Odomzo ®); taladegib; |
| | Cyclopamine; Vismodegib; GANT-61; purmorphamine; GDC-0449 |
| SRC | saracatinib; ilorasertib; dasatinib (e.g., BMS-354825, Sprycel ®); KX2-391; XL228; WH-4- |
| | 025; AZD0530; KX01; bosutinib (e.g., SKI-606, Bosulif ®); vandetanib |
| SSTR2 | lanreotide |
| SSTR5 | lanreotide |
| STAT3 | OPB-31121; pyrimethamine (e.g., Daraprim ®); niclosamide (e.g., Niclocide ®); S3I-201; |
| | NSC74859 |
| SYK | entospletinib; PRT062070; fostamatinib; R-406 |
| TBK1 | momelotinib; BX-795 |
| TEK | glesatinib; cabozantinib (e.g., Cabometyx ® (tablet), Cometriq ® (capsule)); vandetanib; |
| | regorafenib; XL184; BMS-907351; MGCD-265 |
| TERT | BIBR-1532; MST-312 |
| TGFB1 | luspatercept |
| TGFBR1 | galunisertib; TEW-7197; SB-525334; SB-431542; LY-2157299; SB-505124 |
| TLR5 | Entolimod |
| TLR7 | Imiquimod |
| TLR8 | motolimod; imiquimod |
| TNF | thalidomide; lenalidomide |
| TNFRSF8 | brentuximab vedotin (e.g., Adcetris ®) |
| TNFSF11 | denosumab (e.g., Xgeva) |
| TNFSF13B | belimumab (e.g., Benlysta) |
| TNKS | Chembridge cat# 7667791; XAV 939 |
| TOP1 | etirinotecan pegol; irinotecan (e.g., Camptosar ®); irinotecan liposome (e.g., Onivyde ®); |
| | camptothecin; irinotecan; topotecan hydrochloride; SN-38; 7-ethyl-10- |
| | hydroxycamptothecin; topotecan (e.g., Hycamtin ®); irinotecan trihydrochloride |
| TOP1MT | irinotecan; topotecan hydrochloride |
| TOP2A | mitoxantrone (e.g., Novantrone ®); daunorubicin (e.g., Cerubidine ®); liposomal |
| | daunorubicin (e.g., DaunoXome ®); doxorubicin (e.g., Adriamycin PFS ®); liposomal |
| | doxorubicin (e.g., Doxil ®); epirubicin (e.g., Ellence ®); idarubicin (e.g., Idamycin ®); |
| | valrubicin (e.g., Valstar); etoposide/etoposide phosphate (e.g., Toposar, Etopophos ®); |
| | teniposide (e.g., Vumon ®, VM-26); amonafide; hydroxydaunorubicin |
| TOP2B | mitoxantrone (e.g., Novantrone ®); daunorubicin (e.g., Cerubidine ®); liposomal |
| | daunorubicin (e.g., DaunoXome ®); doxorubicin (e.g., Adriamycin PFS ®); liposomal |
| | doxorubicin (e.g., Doxil ®); epirubicin (e.g., Ellence ®); idarubicin (e.g., Idamycin ®); |
| | valrubicin (e.g., Valstar); etoposide/etoposide phosphate (e.g., Toposar, Etopophos ®); |
| | teniposide (e.g., Vumon ®, VM-26); amonafide |
| TUBA1A | vinblastine sulfate (e.g., Oncovin ®) |
| TUBA4A | vincristine sulfate (e.g., Oncovin ®); paclitaxel (e.g., Taxol ®); docetaxel (e.g., Taxotere ®); |
| | cabazitaxel; eribulin mesylate |
| TUBB | vincristine sulfate (e.g., Oncovin ®); vinblastine sulfate; vinorelbine tartrate |
| TUBB1 | paclitaxel (e.g., Taxol ®); docetaxel (e.g., Taxotere ®); cabazitaxel; eribulin mesylate; |
| | vincristine (e.g., Oncovin ®); leurocristine |
| TUBB3 | Ixabepilone |
| TUBD1 | vinblastine sulfate |
| TUBE1 | vinblastine sulfate |
| TUBG1 | vinblastine sulfate |
| TXN | PX-12; IV-2 |
| TYK2 | INCB-18424 |
| TYMS | leucovorin; gemcitabine; capecitabine; pemetrexed disodium; pralatrexate; fluorouracil |
| | (e.g., Adrucil ®, Efudex ®) |
| VDR | BXL-628; elocalcitol |
| VEGFA | bevacizumab (e.g., Avastin ®); navicixizumab; vanucizumab; muparfostat; ziv-aflibercept |
| | (e.g., Zaltrap ®); vandetanib |
| VEGFB | ziv-aflibercept (e.g., Zaltrap ®); muparfostat; bevacizumab (e.g., Avastin ®) |
| WEE1 | AZD1775, MK1775; 681640; MK-1775; BRD9876 |
| XIAP | birinapant; embelin; LBW242; SM-406; AT-406; TL-32711 |
| XPO1 | selinexor; leptomycin B; compound 7d-cis; BRD9047 |
| YES1 | dasatinib (e.g., BMS-354825, Sprycel ®) |

[0283] Tables 4-5C provide exemplary protein targets of known therapeutic agents, one or more of which may be useful in a target library described herein.

TABLE 4
Gene targets of therapeutic agents.

| Gene | | | | |
|---|---|---|---|---|
| Symbol | Ensembl ID | Gene Name | Chr | Position |
| ABAT | ENSG00000183044 | 4-aminobutyrate aminotransferase | 16 | 8674596-8784575 |
| ABCA1 | ENSG00000165029 | ATP binding cassette subfamily A member 1 | 9 | 104781006-104928155 |
| ABCC1 | ENSG00000103222 | ATP binding cassette subfamily C member 1 | 16 | 15949577-16143074 |
| ABCC2 | ENSG00000023839 | ATP binding cassette subfamily C member 2 | 10 | 99782640-99852594 |
| ABCC8 | ENSG00000006071 | ATP binding cassette subfamily C member 8 | 11 | 17392498-17476879 |
| ABL1 | ENSG00000097007 | ABL proto-oncogene 1, non-receptor tyrosine | 9 | 130713016-130887675 |
| | | kinase | | |
| ABL2 | ENSG00000143322 | ABL proto-oncogene 2, non-receptor tyrosine | 1 | 179099330-179229684 |
| | | kinase | | |
| ACAA1 | ENSG00000060971 | Acetyl-CoA acyltransferase 1 | 3 | 38103129-38137242 |
| ACE | ENSG00000159640 | Angiotensin I converting enzyme | 17 | 63477061-63498380 |
| ACE2 | ENSG00000130234 | Angiotensin I converting enzyme 2 | X | 15561033-15602148 |
| ACHE | ENSG00000087085 | Acetylcholinesterase (Cartwright blood group) | 7 | 100889994-100896974 |
| ACP3 | ENSG00000014257 | Acid phosphatase 3 | 3 | 132317369-132368298 |
| ADA | ENSG00000196839 | Adenosine deaminase | 20 | 44619522-44652233 |
| ADH1A | ENSG00000187758 | Alcohol dehydrogenase 1A (class I), alpha | 4 | 99276369-99291003 |
| | | polypeptide | | |
| ADH1B | ENSG00000196616 | Alcohol dehydrogenase 1B (class I), beta | 4 | 99304971-99352760 |
| | | polypeptide | | |
| ADH1C | ENSG00000248144 | Alcohol dehydrogenase 1C (class I), gamma | 4 | 99336497-99352746 |
| | | polypeptide | | |
| ADK | ENSG00000156110 | Adenosine kinase | 10 | 74151202-74709963 |
| ADORA1 | ENSG00000163485 | Adenosine A1 receptor | 1 | 203090654-203167405 |
| ADORA2A | ENSG00000128271 | Adenosine A2a receptor | 22 | 24417879-24442357 |
| ADORA2B | ENSG00000170425 | Adenosine A2b receptor | 17 | 15944917-15975746 |
| ADORA3 | ENSG00000282608 | Adenosine A3 receptor | 1 | 111499429-111503633 |
| ADRA1A | ENSG00000120907 | Adrenoceptor alpha 1A | 8 | 26748150-26867278 |
| ADRA1B | ENSG00000170214 | Adrenoceptor alpha 1B | 5 | 159865080-159973012 |
| ADRA1D | ENSG00000171873 | Adrenoceptor alpha 1D | 20 | 4220630-4249287 |
| ADRA2A | ENSG00000150594 | Adrenoceptor alpha 2A | 10 | 111077029-111080907 |
| ADRA2C | ENSG00000184160 | Adrenoceptor alpha 2C | 4 | 3766348-3768526 |
| ADRB1 | ENSG00000043591 | Adrenoceptor beta 1 | 10 | 114043866-114046904 |
| ADRB2 | ENSG00000169252 | Adrenoceptor beta 2 | 5 | 148825245-148828687 |
| ADRB3 | ENSG00000188778 | Adrenoceptor beta 3 | 8 | 37962990-37966599 |
| AGTR1 | ENSG00000144891 | Angiotensin II receptor type 1 | 3 | 148697784-148743008 |
| AGXT | ENSG00000172482 | Alanine--glyoxylate and serine--pyruvate | 2 | 240868824-240880502 |
| | | aminotransferase | | |
| AKR1C2 | ENSG00000151632 | Aldo-keto reductase family 1 member C2 | 10 | 4987400-5018031 |
| AKR1D1 | ENSG00000122787 | Aldo-keto reductase family 1 member D1 | 7 | 138002324-138118305 |
| AKT1 | ENSG00000142208 | AKT serine/threonine kinase 1 | 14 | 104769349-104795751 |
| AKT2 | ENSG00000105221 | AKT serine/threonine kinase 2 | 19 | 40230317-40285536 |
| AKT3 | ENSG00000117020 | AKT serine/threonine kinase 3 | 1 | 243488233-243851079 |
| ALAD | ENSG00000148218 | Aminolevulinate dehydratase | 9 | 113386312-113401290 |
| ALDH2 | ENSG00000111275 | Aldehyde dehydrogenase 2 family member | 12 | 111766887-111817532 |
| ALK | ENSG00000171094 | ALK receptor tyrosine kinase | 2 | 29192774-29921586 |
| ALOX5 | ENSG00000012779 | Arachidonate 5-lipoxygenase | 10 | 45374176-45446119 |
| ALPG | ENSG00000163286 | Alkaline phosphatase, germ cell | 2 | 232406844-232410714 |
| AMY2A | ENSG00000243480 | Amylase alpha 2A | 1 | 103616811-103625780 |
| ANGPT1 | ENSG00000154188 | Angiopoietin 1 | 8 | 107249482-107498055 |
| ANGPT2 | ENSG00000091879 | Angiopoietin 2 | 8 | 6499632-6563409 |
| ANO1 | ENSG00000131620 | Anoctamin 1 | 11 | 70078302-70189528 |
| ANPEP | ENSG00000166825 | Alanyl aminopeptidase, membrane | 15 | 89784895-89815401 |
| ANXA1 | ENSG00000135046 | Annexin A1 | 9 | 73151865-73170393 |
| AOC3 | ENSG00000131471 | Amine oxidase copper containing 3 | 17 | 42851184-42858130 |
| APEX1 | ENSG00000100823 | Apurinic/apyrimidinic endodeoxyribonuclease 1 | 14 | 20455191-20457772 |
| APH1A | ENSG00000117362 | Aph-1 homolog A, gamma-secretase subunit | 1 | 150265399-150269580 |
| APH1B | ENSG00000138613 | Aph-1 homolog B, gamma-secretase subunit | 15 | 63276018-63309126 |
| APP | ENSG00000142192 | Amyloid beta precursor protein | 21 | 25880550-26171128 |
| AR | ENSG00000169083 | Androgen receptor | X | 67544021-67730619 |
| ARAF | ENSG00000078061 | A-Raf proto-oncogene, serine/threonine kinase | X | 47561100-47571920 |
| ASIC1 | ENSG00000110881 | Acid sensing ion channel subunit 1 | 12 | 50057548-50083611 |
| ATIC | ENSG00000138363 | 5-aminoimidazole-4-carboxamide ribonucleotide | 2 | 215311956-215349773 |
| | | formyltransferase/IMP cyclohydrolase | | |
| ATP1A1 | ENSG00000163399 | ATPase Na+/K+ transporting subunit alpha 1 | 1 | 116372668-116410261 |
| ATP2C1 | ENSG00000017260 | ATPase secretory pathway Ca2+ transporting 1 | 3 | 130850595-131016712 |
| ATP4A | ENSG00000105675 | ATPase H+/K+ transporting subunit alpha | 19 | 35550031-35563658 |
| ATP6V1B2 | ENSG00000147416 | ATPase H+ transporting V1 subunit B2 | 8 | 20197381-20226819 |
| ATR | ENSG00000175054 | ATR serine/threonine kinase | 3 | 142449007-142578733 |
| AURKA | ENSG00000087586 | Aurora kinase A | 20 | 56369389-56392337 |
| AURKB | ENSG00000178999 | Aurora kinase B | 17 | 8204733-8210600 |
| AURKC | ENSG00000105146 | Aurora kinase C | 19 | 57230802-57235548 |
| AVPR1A | ENSG00000166148 | Arginine vasopressin receptor 1A | 12 | 63142759-63151201 |
| AVPR1B | ENSG00000198049 | Arginine vasopressin receptor 1B | 1 | 206106936-206117699 |
| AVPR2 | ENSG00000126895 | Arginine vasopressin receptor 2 | X | 153902531-153907166 |
| AXL | ENSG00000167601 | AXL receptor tyrosine kinase | 19 | 41219223-41261766 |
| B4GALNT1 | ENSG00000135454 | Beta-1,4-N-acetyl-galactosaminyltransferase 1 | 12 | 57623409-57633239 |
| BAX | ENSG00000087088 | BCL2 associated X, apoptosis regulator | 19 | 48954815-48961798 |
| BCHE | ENSG00000114200 | Butyrylcholinesterase | 3 | 165772904-165837462 |
| BCL2 | ENSG00000171791 | BCL2 apoptosis regulator | 18 | 63123346-63320128 |
| BCL2L1 | ENSG00000171552 | BCL2 like 1 | 20 | 31664452-31723989 |
| BCL2L2 | ENSG00000129473 | BCL2 like 2 | 14 | 23298790-23311751 |
| BCR | ENSG00000186716 | BCR activator of RhoGEF and GTPase | 22 | 23179704-23318037 |
| BDKRB2 | ENSG00000168398 | Bradykinin receptor B2 | 14 | 96204679-96244166 |
| BGLAP | ENSG00000242252 | Bone gamma-carboxyglutamate protein | 1 | 156242184-156243317 |
| BIRC5 | ENSG00000089685 | Baculoviral IAP repeat containing 5 | 17 | 78214186-78225636 |
| BLK | ENSG00000136573 | BLK proto-oncogene, Src family tyrosine kinase | 8 | 11486894-11564599 |
| BLVRB | ENSG00000090013 | Biliverdin reductase B | 19 | 40447765-40465764 |
| BMX | ENSG00000102010 | BMX non-receptor tyrosine kinase | X | 15464246-15556529 |
| BRAF | ENSG00000157764 | B-Raf proto-oncogene, serine/threonine kinase | 7 | 140719327-140924928 |
| BRD2 | ENSG00000204256 | Bromodomain containing 2 | 6 | 32968594-32981505 |
| BRD3 | ENSG00000169925 | Bromodomain containing 3 | 9 | 134030305-134068535 |
| BRD4 | ENSG00000141867 | Bromodomain containing 4 | 19 | 15235519-15332545 |
| BTK | ENSG00000010671 | Bruton tyrosine kinase | X | 101349447-101390796 |
| C1R | ENSG00000159403 | Complement C1r | 12 | 7080214-7092540 |
| C1S | ENSG00000182326 | Complement C1s | 12 | 6988259-7071032 |
| C3 | ENSG00000125730 | Complement C3 | 19 | 6677704-6730562 |
| C4A | ENSG00000244731 | Complement C4A (Rodgers blood group) | 6 | 31982057-32002681 |
| C4B | ENSG00000224389 | Complement C4B (Chido blood group) | 6 | 32014795-32035418 |
| C5 | ENSG00000106804 | Complement C5 | 9 | 120952335-121050275 |
| CA1 | ENSG00000133742 | Carbonic anhydrase 1 | 8 | 85327608-85379014 |
| CA14 | ENSG00000118298 | Carbonic anhydrase 14 | 1 | 150257251-150265078 |
| CA2 | ENSG00000104267 | Carbonic anhydrase 2 | 8 | 85463968-85481493 |
| CA3 | ENSG00000164879 | Carbonic anhydrase 3 | 8 | 85373436-85449040 |
| CA4 | ENSG00000167434 | Carbonic anhydrase 4 | 17 | 60149942-60170899 |
| CA7 | ENSG00000168748 | Carbonic anhydrase 7 | 16 | 66844414-66854153 |
| CACNA1A | ENSG00000141837 | Calcium voltage-gated channel subunit alpha1 A | 19 | 13206442-13633025 |
| CACNA1B | ENSG00000148408 | Calcium voltage-gated channel subunit alpha1 B | 9 | 137877782-138124624 |
| CACNA1C | ENSG00000151067 | Calcium voltage-gated channel subunit alpha1 C | 12 | 1970786-2697950 |
| CACNA1D | ENSG00000157388 | Calcium voltage-gated channel subunit alpha1 D | 3 | 53328963-53813733 |
| CACNA1F | ENSG00000102001 | Calcium voltage-gated channel subunit alpha1 F | X | 49205063-49233371 |
| CACNA1G | ENSG00000006283 | Calcium voltage-gated channel subunit alpha1 G | 17 | 50560715-50627474 |
| CACNA1H | ENSG00000196557 | Calcium voltage-gated channel subunit alpha1 H | 16 | 1153106-1221771 |
| CACNA1I | ENSGOOOOO100346 | Calcium voltage-gated channel subunit alpha1 I | 22 | 39570753-39689735 |
| CACNA1S | ENSG00000081248 | Calcium voltage-gated channel subunit alpha1 S | 1 | 201039512-201112451 |
| CACNA2D1 | ENSG00000153956 | Calcium voltage-gated channel auxiliary subunit | 7 | 81946444-82443777 |
| | | alpha2delta 1 | | |
| CACNA2D2 | ENSG00000007402 | Calcium voltage-gated channel auxiliary subunit | 3 | 50362799-50504244 |
| | | alpha2delta 2 | | |
| CACNB1 | ENSG00000067191 | Calcium voltage-gated channel auxiliary subunit | 17 | 39173453-39197703 |
| | | beta 1 | | |
| CACNB2 | ENSG00000165995 | Calcium voltage-gated channel auxiliary subunit | 10 | 18140424-18543557 |
| | | beta 2 | | |
| CACNB3 | ENSG00000167535 | Calcium voltage-gated channel auxiliary subunit | 12 | 48813794-48828941 |
| | | beta 3 | | |
| CACNB4 | ENSG00000182389 | Calcium voltage-gated channel auxiliary subunit | 2 | 151832768-152099475 |
| | | beta 4 | | |
| CACNG1 | ENSG00000108878 | Calcium voltage-gated channel auxiliary subunit | 17 | 67044554-67056797 |
| | | gamma 1 | | |
| CALY | ENSG00000130643 | Calcyon neuron specific vesicular protein | 10 | 133324072-133336935 |
| CAMLG | ENSG00000164615 | Calcium modulating ligand | 5 | 134738548-134752157 |
| CARTPT | ENSG00000164326 | CART prepropeptide | 5 | 71719275-71721048 |
| CASR | ENSG00000036828 | Calcium sensing receptor | 3 | 122183668-122291629 |
| CAT | ENSG00000121691 | Catalase | 11 | 34438934-34472060 |
| CCKAR | ENSG00000163394 | Cholecystokinin A receptor | 4 | 26481396-26490484 |
| CCKBR | ENSG00000110148 | Cholecystokinin B receptor | 11 | 6259806-6272127 |
| CCL2 | ENSG00000108691 | C-C motif chemokine ligand 2 | 17 | 34255218-34257203 |
| CCND1 | ENSG00000110092 | Cyclin D1 | 11 | 69641156-69654474 |
| CCND2 | ENSG00000118971 | Cyclin D2 | 12 | 4273762-4305353 |
| CCND3 | ENSG00000112576 | Cyclin D3 | 6 | 41934934-42050357 |
| CCR5 | ENSG00000160791 | C-C motif chemokine receptor 5 | 3 | 46370854-46376206 |
| | | (gene/pseudogene) | | |
| CD19 | ENSG00000177455 | CD19 molecule | 16 | 28931965-28939342 |
| CD2 | ENSG00000116824 | CD2 molecule | 1 | 116754430-116769229 |
| CD247 | ENSG00000198821 | CD247 molecule | 1 | 167430640-167518610 |
| CD274 | ENSG00000120217 | CD274 molecule | 9 | 5450503-5470566 |
| CD33 | ENSG00000105383 | CD33 molecule | 19 | 51225064-51243860 |
| CD38 | ENSG00000004468 | CD38 molecule | 4 | 15778275-15853232 |
| CD3D | ENSG00000167286 | CD3d molecule | 11 | 118338954-118342744 |
| CD3E | ENSG00000198851 | CD3e molecule | 11 | 118304730-118316175 |
| CD3G | ENSG00000160654 | CD3g molecule | 11 | 118344344-118355161 |
| CD4 | ENSG00000010610 | CD4 molecule | 12 | 6786858-6820799 |
| CD44 | ENSG00000026508 | CD44 molecule (Indian blood group) | 11 | 35138870-35232402 |
| CD52 | ENSG00000169442 | CD52 molecule | 1 | 26317958-26320523 |
| CD80 | ENSG00000121594 | CD80 molecule | 3 | 119524293-119559614 |
| CD86 | ENSG00000114013 | CD86 molecule | 3 | 122055362-122121139 |
| CDK1 | ENSG00000170312 | Cyclin dependent kinase 1 | 10 | 60778331-60794852 |
| CDK2 | ENSG00000123374 | Cyclin dependent kinase 2 | 12 | 55966781-55972789 |
| CDK4 | ENSG00000135446 | Cyclin dependent kinase 4 | 12 | 57747727-57756013 |
| CDK5 | ENSG00000164885 | Cyclin dependent kinase 5 | 7 | 151053815-151057897 |
| CDK6 | ENSG00000105810 | Cyclin dependent kinase 6 | 7 | 92604921-92836573 |
| CDK7 | ENSG00000134058 | Cyclin dependent kinase 7 | 5 | 69234795-69277430 |
| CDK9 | ENSG00000136807 | Cyclin dependent kinase 9 | 9 | 127785679-127790792 |
| CES1 | ENSG00000198848 | Carboxylesterase 1 | 16 | 55802851-55833337 |
| CFTR | ENSG00000001626 | CF transmembrane conductance regulator | 7 | 117287120-117715971 |
| CHD1 | ENSG00000153922 | Chromodomain helicase DNA binding protein 1 | 5 | 98853985-98928957 |
| CHEK1 | ENSG00000149554 | Checkpoint kinase 1 | 11 | 125625665-125676255 |
| CHEK2 | ENSG00000183765 | Checkpoint kinase 2 | 22 | 28687743-28742422 |
| CHRM1 | ENSG00000168539 | Cholinergic receptor muscarinic 1 | 11 | 62908679-62921807 |
| CHRM2 | ENSG00000181072 | Cholinergic receptor muscarinic 2 | 7 | 136868669-137020255 |
| CHRM3 | ENSG00000133019 | Cholinergic receptor muscarinic 3 | 1 | 239386565-239915452 |
| CHRM4 | ENSG00000180720 | Cholinergic receptor muscarinic 4 | 11 | 46385098-46386608 |
| CHRM5 | ENSG00000184984 | Cholinergic receptor muscarinic 5 | 15 | 33968497-34067458 |
| CHRNA10 | ENSG00000129749 | Cholinergic receptor nicotinic alpha 10 subunit | 11 | 3665587-3671384 |
| CHRNA2 | ENSG00000120903 | Cholinergic receptor nicotinic alpha 2 subunit | 8 | 27459756-27479883 |
| CHRNA3 | ENSG00000080644 | Cholinergic receptor nicotinic alpha 3 subunit | 15 | 78593052-78621295 |
| CHRNA4 | ENSG00000101204 | Cholinergic receptor nicotinic alpha 4 subunit | 20 | 63343223-63378401 |
| CHRNA7 | ENSG00000175344 | Cholinergic receptor nicotinic alpha 7 subunit | 15 | 31923438-32173018 |
| CHRNB2 | ENSG00000160716 | Cholinergic receptor nicotinic beta 2 subunit | 1 | 154567778-154580013 |
| CHRNB4 | ENSG00000117971 | Cholinergic receptor nicotinic beta 4 subunit | 15 | 78624111-78727754 |
| CKB | ENSG00000166165 | Creatine kinase B | 14 | 103519667-103522833 |
| CKM | ENSG00000104879 | Creatine kinase, M-type | 19 | 45306413-45322875 |
| CKMT1A | ENSG00000223572 | Creatine kinase, mitochondrial 1A | 15 | 43692886-43699222 |
| CKMT1B | ENSG00000237289 | Creatine kinase, mitochondrial 1B | 15 | 43593054-43604901 |
| CKMT2 | ENSG00000131730 | Creatine kinase, mitochondrial 2 | 5 | 81233320-81266398 |
| CLCN2 | ENSG00000114859 | Chloride voltage-gated channel 2 | 3 | 184346185-184361650 |
| CNR1 | ENSG00000118432 | Cannabinoid receptor 1 | 6 | 88139864-88166359 |
| CNR2 | ENSG00000188822 | Cannabinoid receptor 2 | 1 | 23870515-23913362 |
| COMT | ENSG00000093010 | Catechol-O-methyltransferase | 22 | 19941733-19969975 |
| CPS1 | ENSG00000021826 | Carbamoyl-phosphate synthase 1 | 2 | 210477682-210679107 |
| CPT1A | ENSG00000110090 | Carnitine palmitoyltransferase 1A | 11 | 68754620-68844410 |
| CPT2 | ENSG00000157184 | Carnitine palmitoyltransferase 2 | 1 | 53196792-53214197 |
| CRBN | ENSG00000113851 | Cereblon | 3 | 3144628-3179727 |
| CRHR1 | ENSG00000120088 | Corticotropin releasing hormone receptor 1 | 17 | 45784280-45835828 |
| CRTC1 | ENSG00000105662 | CREB regulated transcription coactivator 1 | 19 | 18683678-18782333 |
| CRTC2 | ENSG00000160741 | CREB regulated transcription coactivator 2 | 1 | 153947669-153958615 |
| CSF1R | ENSG00000182578 | Colony stimulating factor 1 receptor | 5 | 150053291-150113372 |
| CSF2RA | ENSG00000198223 | Colony stimulating factor 2 receptor subunit | X | 1268800-1310381 |
| | | alpha | | |
| CSF2RB | ENSG00000100368 | Colony stimulating factor 2 receptor subunit beta | 22 | 36913628-36940439 |
| CSF3R | ENSG00000119535 | Colony stimulating factor 3 receptor | 1 | 36466043-36483278 |
| CSNK2A1 | ENSG00000101266 | Casein kinase 2 alpha 1 | 20 | 472498-543835 |
| CSNK2A2 | ENSG00000070770 | Casein kinase 2 alpha 2 | 16 | 58157907-58198106 |
| CTLA4 | ENSG00000163599 | Cytotoxic T-lymphocyte associated protein 4 | 2 | 203867771-203873965 |
| CXCR1 | ENSG00000163464 | C-X-C motif chemokine receptor 1 | 2 | 218162841-218166962 |
| CXCR2 | ENSG00000180871 | C-X-C motif chemokine receptor 2 | 2 | 218125289-218137251 |
| CXCR4 | ENSG00000121966 | C-X-C motif chemokine receptor 4 | 2 | 136114349-136118149 |
| CYP11A1 | ENSG00000140459 | Cytochrome P450 family 11 subfamily A | 15 | 74337759-74367646 |
| | | member 1 | | |
| CYP11B1 | ENSG00000160882 | Cytochrome P450 family 11 subfamily B | 8 | 142872356-142879846 |
| | | member 1 | | |
| CYP11B2 | ENSG00000179142 | Cytochrome P450 family 11 subfamily B | 8 | 142910558-142917862 |
| | | member 2 | | |
| CYP17A1 | ENSG00000148795 | Cytochrome P450 family 17 subfamily A | 10 | 102830531-102837472 |
| | | member 1 | | |
| CYP19A1 | ENSG00000137869 | Cytochrome P450 family 19 subfamily A | 15 | 51208057-51338601 |
| | | member 1 | | |
| CYP51A1 | ENSG00000001630 | Cytochrome P450 family 51 subfamily A | 7 | 92112153-92134803 |
| | | member 1 | | |
| CYSLTR1 | ENSG00000173198 | Cysteinyl leukotriene receptor 1 | X | 78271468-78327691 |
| CYSLTR2 | ENSG00000152207 | Cysteinyl leukotriene receptor 2 | 13 | 48653711-48711226 |
| DBH | ENSG00000123454 | Dopamine beta-hydroxylase | 9 | 133636363-133659329 |
| DCK | ENSG00000156136 | Deoxycytidine kinase | 4 | 70992538-71030914 |
| DDC | ENSG00000132437 | Dopa decarboxylase | 7 | 50458436-50565405 |
| DDR2 | ENSG00000162733 | Discoidin domain receptor tyrosine kinase 2 | 1 | 162631373-162787405 |
| DHFR | ENSG00000228716 | Dihydrofolate reductase | 5 | 80626226-80654983 |
| DHH | ENSG00000139549 | Desert hedgehog signaling molecule | 12 | 49086656-49094801 |
| DHODH | ENSG00000102967 | Dihydroorotate dehydrogenase (quinone) | 16 | 72008588-72027664 |
| DHX9 | ENSG00000135829 | DExH-box helicase 9 | 1 | 182839347-182887982 |
| DNMT1 | ENSG00000130816 | DNA methyltransferase 1 | 19 | 10133345-10231286 |
| DOT1L | ENSG00000104885 | DOT1 like histone lysine methyltransferase | 19 | 2163933-2232578 |
| DPEP1 | ENSG00000015413 | Dipeptidase 1 | 16 | 89613308-89638456 |
| DPP4 | ENSG00000197635 | Dipeptidyl peptidase 4 | 2 | 161992245-162074215 |
| DRD1 | ENSG00000184845 | Dopamine receptor D1 | 5 | 175440036-175444182 |
| DRD2 | ENSG00000149295 | Dopamine receptor D2 | 11 | 113409605-113475691 |
| DRD3 | ENSG00000151577 | Dopamine receptor D3 | 3 | 114127580-114199407 |
| DRD4 | ENSG00000069696 | Dopamine receptor D4 | 11 | 637269-640706 |
| DRD5 | ENSG00000169676 | Dopamine receptor D5 | 4 | 9781634-9784009 |
| DYRK1A | ENSG00000157540 | Dual specificity tyrosine phosphorylation | 21 | 37365573-37526358 |
| | | regulated kinase 1A | | |
| DYRK1B | ENSG00000105204 | Dual specificity tyrosine phosphorylation | 19 | 39825350-39834201 |
| | | regulated kinase 1B | | |
| DYRK2 | ENSG00000127334 | Dual specificity tyrosine phosphorylation | 12 | 67648338-67665406 |
| | | regulated kinase 2 | | |
| DYRK3 | ENSG00000143479 | Dual specificity tyrosine phosphorylation | 1 | 206635536-206684419 |
| | | regulated kinase 3 | | |
| DYRK4 | ENSG00000010219 | Dual specificity tyrosine phosphorylation | 12 | 4562204-4615302 |
| | | regulated kinase 4 | | |
| EDNRA | ENSG00000151617 | Endothelin receptor type A | 4 | 147480917-147544954 |
| EDNRB | ENSG00000136160 | Endothelin receptor type B | 13 | 77895481-77975529 |
| EGF | ENSG00000138798 | Epidermal growth factor | 4 | 109912883-110013766 |
| EGFR | ENSG00000146648 | Epidermal growth factor receptor | 7 | 55019021-55211628 |
| EHMT1 | ENSG00000181090 | Euchromatic histone lysine methyltransferase 1 | 9 | 137618992-137870016 |
| EHMT2 | ENSG00000204371 | Euchromatic histone lysine methyltransferase 2 | 6 | 31879759-31897687 |
| EIF4E | ENSG00000151247 | Eukaryotic translation initiation factor 4E | 4 | 98871684-98930637 |
| ELANE | ENSG00000197561 | Elastase, neutrophil expressed | 19 | 851014-856247 |
| EPHA2 | ENSG00000142627 | EPH receptor A2 | 1 | 16124337-16156069 |
| EPHB4 | ENSG00000196411 | EPH receptor B4 | 7 | 100802565-100827523 |
| EPOR | ENSG00000187266 | Erythropoietin receptor | 19 | 11377207-11384342 |
| ERBB2 | ENSG00000141736 | Erb-b2 receptor tyrosine kinase 2 | 17 | 39687914-39730426 |
| ERBB3 | ENSG00000065361 | Erb-b2 receptor tyrosine kinase 3 | 12 | 56076799-56103505 |
| ERBB4 | ENSG00000178568 | Erb-b2 receptor tyrosine kinase 4 | 2 | 211375717-212538841 |
| ESRI | ENSG00000091831 | Estrogen receptor 1 | 6 | 151656691-152129619 |
| ESR2 | ENSG00000140009 | Estrogen receptor 2 | 14 | 64084232-64338112 |
| ESRRG | ENSG00000196482 | Estrogen related receptor gamma | 1 | 216503246-217137755 |
| EZH2 | ENSG00000106462 | Enhancer of zeste 2 polycomb repressive | 7 | 148807383-148884321 |
| | | complex 2 subunit | | |
| F10 | ENSG00000126218 | Coagulation factor X | 13 | 113122799-113149529 |
| F11 | ENSG00000088926 | Coagulation factor XI | 4 | 186266189-186289681 |
| F12 | ENSG00000131187 | Coagulation factor XII | 5 | 177402140-177409576 |
| F2 | ENSG00000180210 | Coagulation factor II, thrombin | 11 | 46719196-46739506 |
| F2R | ENSG00000181104 | Coagulation factor II thrombin receptor | 5 | 76716126-76735770 |
| F3 | ENSG00000117525 | Coagulation factor III, tissue factor | 1 | 94529173-94541759 |
| F5 | ENSG00000198734 | Coagulation factor V | 1 | 169511951-169586588 |
| F7 | ENSG00000057593 | Coagulation factor VII | 13 | 113105788-113120685 |
| F8 | ENSG00000185010 | Coagulation factor VIII | X | 154835788-155026940 |
| F9 | ENSG00000101981 | Coagulation factor IX | X | 139530739-139563459 |
| FADS1 | ENSG00000149485 | Fatty acid desaturase 1 | 11 | 61799627-61829318 |
| FADS2 | ENSG00000134824 | Fatty acid desaturase 2 | 11 | 61792980-61867354 |
| FASN | ENSG00000169710 | Fatty acid synthase | 17 | 82078338-82098294 |
| FCER1A | ENSG00000179639 | Fc fragment of IgE receptor Ia | 1 | 159289714-159308224 |
| FCER1G | ENSG00000158869 | Fc fragment of IgE receptor Ig | 1 | 161215234-161220699 |
| FCGR1A | ENSG00000150337 | Fc fragment of IgG receptor Ia | 1 | 149782671-149792518 |
| FCGR1B | ENSG00000198019 | Fc fragment of IgG receptor Ib | 1 | 121087345-121097161 |
| FCGR2A | ENSG00000143226 | Fc fragment of IgG receptor IIa | 1 | 161505430-161524013 |
| FCGR2B | ENSG00000072694 | Fc fragment of IgG receptor IIb | 1 | 161663147-161678654 |
| FCGR3A | ENSG00000203747 | Fc fragment of IgG receptor IIIa | 1 | 161541759-161550737 |
| FCGR3B | ENSG00000162747 | Fc fragment of IgG receptor IIIb | 1 | 161623196-161631963 |
| FDPS | ENSG00000160752 | Famesyl diphosphate synthase | 1 | 155308748-155320666 |
| FFAR1 | ENSG00000126266 | Free fatty acid receptor 1 | 19 | 35351552-35353862 |
| FGA | ENSG00000171560 | Fibrinogen alpha chain | 4 | 154583128-154590745 |
| FGF1 | ENSG00000113578 | Fibroblast growth factor 1 | 5 | 142592178-142698070 |
| FGF2 | ENSG00000138685 | Fibroblast growth factor 2 | 4 | 122826708-122898236 |
| FGFR1 | ENSG00000077782 | Fibroblast growth factor receptor 1 | 8 | 38400215-38468834 |
| FGFR2 | ENSG00000066468 | Fibroblast growth factor receptor 2 | 10 | 121478332-121598458 |
| FGFR3 | ENSG00000068078 | Fibroblast growth factor receptor 3 | 4 | 1793293-1808872 |
| FGFR4 | ENSG00000160867 | Fibroblast growth factor receptor 4 | 5 | 177086905-177098144 |
| FGR | ENSG00000000938 | FGR proto-oncogene, Src family tyrosine kinase | 1 | 27612064-27635185 |
| FKBP1A | ENSG00000088832 | FKBP prolyl isomerase 1A | 20 | 1368978-1393172 |
| FLT1 | ENSG00000102755 | Fms related receptor tyrosine kinase 1 | 13 | 28300346-28495145 |
| FLT3 | ENSG00000122025 | Fms related receptor tyrosine kinase 3 | 13 | 28003274-28100592 |
| FLT4 | ENSG00000037280 | Fms related receptor tyrosine kinase 4 | 5 | 180601506-180649624 |
| FN1 | ENSG00000115414 | Fibronectin 1 | 2 | 215360440-215436073 |
| FNTA | ENSG00000168522 | Famesyltransferase, CAAX box, alpha | 8 | 43034194-43085788 |
| FOLH1 | ENSG00000086205 | Folate hydrolase 1 | 11 | 49145092-49208638 |
| FOLR1 | ENSG00000110195 | Folate receptor alpha | 11 | 72189558-72196323 |
| FOLR2 | ENSG00000165457 | Folate receptor beta | 11 | 72216601-72221950 |
| FOLR3 | ENSG00000110203 | Folate receptor gamma | 11 | 72114869-72139892 |
| FRK | ENSG00000111816 | Fyn related Src family tyrosine kinase | 6 | 115931149-116060891 |
| FSHR | ENSG00000170820 | Follicle stimulating hormone receptor | 2 | 48962157-49154527 |
| FTH1 | ENSG00000167996 | Ferritin heavy chain 1 | 11 | 61959718-61967634 |
| FTL | ENSG00000087086 | Ferritin light chain | 19 | 48965309-48966879 |
| FXYD2 | ENSG00000137731 | FXYD domain containing ion transport regulator | 11 | 117800844-117828698 |
| | | 2 | | |
| FYN | ENSG00000010810 | FYN proto-oncogene, Src family tyrosine kinase | 6 | 111660332-111873452 |
| FZD8 | ENSG00000177283 | Frizzled class receptor 8 | 10 | 35638249-35642278 |
| GAA | ENSG00000171298 | Glucosidase alpha, acid | 17 | 80101556-80119881 |
| GABBR1 | ENSG00000204681 | Gamma-aminobutyric acid type B receptor | 6 | 29555629-29633976 |
| | | subunit 1 | | |
| GABBR2 | ENSG00000136928 | Gamma-aminobutyric acid type B receptor | 9 | 98288109-98708935 |
| | | subunit 2 | | |
| GABRA1 | ENSG00000022355 | Gamma-aminobutyric acid type A receptor | 5 | 161847063-161899981 |
| | | subunit alpha1 | | |
| GABRA2 | ENSG00000151834 | Gamma-aminobutyric acid type A receptor | 4 | 46248427-46475230 |
| | | subunit alpha2 | | |
| GABRA3 | ENSG00000011677 | Gamma-aminobutyric acid type A receptor | X | 152166234-152451315 |
| | | subunit alpha3 | | |
| GABRA4 | ENSG00000109158 | Gamma-aminobutyric acid type A receptor | 4 | 46918900-46993581 |
| | | subunit alpha4 | | |
| GABRA5 | ENSG00000186297 | Gamma-aminobutyric acid type A receptor | 15 | 26866911-26949208 |
| | | subunit alpha5 | | |
| GABRA6 | ENSG00000145863 | Gamma-aminobutyric acid type A receptor | 5 | 161547063-161702593 |
| | | subunit alpha6 | | |
| GABRB1 | ENSG00000163288 | Gamma-aminobutyric acid type A receptor | 4 | 46993723-47426447 |
| | | subunit beta1 | | |
| GABRB2 | ENSG00000145864 | Gamma-aminobutyric acid type A receptor | 5 | 161288429-161549044 |
| | | subunit beta2 | | |
| GABRB3 | ENSG00000166206 | Gamma-aminobutyric acid type A receptor | 15 | 26543546-26939539 |
| | | subunit beta3 | | |
| GABRD | ENSG00000187730 | Gamma-aminobutyric acid type A receptor | 1 | 2019329-2030758 |
| | | subunit delta | | |
| GABRE | ENSG00000102287 | Gamma-aminobutyric acid type A receptor | X | 151953124-151974680 |
| | | subunit epsilon | | |
| GABRG1 | ENSG00000163285 | Gamma-aminobutyric acid type A receptor | 4 | 46035769-46124054 |
| | | subunit gamma1 | | |
| GABRG2 | ENSG00000113327 | Gamma-aminobutyric acid type A receptor | 5 | 162000057-162162977 |
| | | subunit gamma2 | | |
| GABRG3 | ENSG00000182256 | Gamma-aminobutyric acid type A receptor | 15 | 26971181-27541984 |
| | | subunit gamma3 | | |
| GABRP | ENSG00000094755 | Gamma-aminobutyric acid type A receptor | 5 | 170763350-170814047 |
| | | subunit pi | | |
| GABRQ | ENSG00000268089 | Gamma-aminobutyric acid type A receptor | X | 152637895-152657542 |
| | | subunit theta | | |
| GABRR1 | ENSG00000146276 | Gamma-aminobutyric acid type A receptor | 6 | 89177504-89231278 |
| | | subunit rho1 | | |
| GABRR2 | ENSG00000111886 | Gamma-aminobutyric acid type A receptor | 6 | 89254464-89315299 |
| | | subunit rho2 | | |
| GABRR3 | ENSG00000183185 | Gamma-aminobutyric acid type A receptor | 3 | 97986673-98035304 |
| | | subunit rho3 (gene/pseudogene) | | |
| GAMT | ENSG00000130005 | Guanidinoacetate N-methyltransferase | 19 | 1397026-1401570 |
| GANAB | ENSG00000089597 | Glucosidase II alpha subunit | 11 | 62624826-62646726 |
| GANC | ENSG00000214013 | Glucosidase alpha, neutral C | 15 | 42273233-42356935 |
| GART | ENSG00000159131 | Phosphoribosylglycinamide formyltransferase, | 21 | 33503931-33543491 |
| | | phosphoribosylglycinamide synthetase, | | |
| | | phosphoribosylaminoimidazole synthetase | | |
| GCGR | ENSG00000215644 | Glucagon receptor | 17 | 81804132-81814008 |
| GGCX | ENSG00000115486 | Gamma-glutamyl carboxylase | 2 | 85544720-85561547 |
| GGPS1 | ENSG00000152904 | Geranylgeranyl diphosphate synthase 1 | 1 | 235327350-235344532 |
| GHR | ENSG00000112964 | Growth hormone receptor | 5 | 42423439-42721878 |
| GHRHR | ENSG00000106128 | Growth hormone releasing hormone receptor | 7 | 30938669-30993254 |
| GLP1R | ENSG00000112164 | Glucagon like peptide 1 receptor | 6 | 39048781-39091303 |
| GLP2R | ENSG00000065325 | Glucagon like peptide 2 receptor | 17 | 9822206-9892099 |
| GLRA1 | ENSG00000145888 | Glycine receptor alpha 1 | 5 | 151822513-151924851 |
| GLRA2 | ENSG00000101958 | Glycine receptor alpha 2 | X | 14529298-14731812 |
| GLRA3 | ENSG00000145451 | Glycine receptor alpha 3 | 4 | 174636920-174829247 |
| GLRB | ENSG00000109738 | Glycine receptor beta | 4 | 157076125-157172090 |
| GNRH1 | ENSG00000147437 | Gonadotropin releasing hormone 1 | 8 | 25419258-25424654 |
| GNRHR | ENSG00000109163 | Gonadotropin releasing hormone receptor | 4 | 67737118-67754388 |
| GRIA1 | ENSG00000155511 | Glutamate ionotropic receptor AMPA type | 5 | 153489615-153813869 |
| | | subunit 1 | | |
| GRIK1 | ENSG00000171189 | Glutamate ionotropic receptor kainate type | 21 | 29536933-29940033 |
| | | subunit 1 | | |
| GRIN1 | ENSG00000176884 | Glutamate ionotropic receptor NMDA type | 9 | 137139154-137168756 |
| | | subunit 1 | | |
| GRIN2A | ENSG00000183454 | Glutamate ionotropic receptor NMDA type | 16 | 9753404-10182754 |
| | | subunit 2A | | |
| GRIN2B | ENSG00000273079 | Glutamate ionotropic receptor NMDA type | 12 | 13437942-13981957 |
| | | subunit 2B | | |
| GRIN2C | ENSG00000161509 | Glutamate ionotropic receptor NMDA type | 17 | 74842023-74861504 |
| | | subunit 2C | | |
| GRIN2D | ENSG00000105464 | Glutamate ionotropic receptor NMDA type | 19 | 48394875-48444931 |
| | | subunit 2D | | |
| GRIN3A | ENSG00000198785 | Glutamate ionotropic receptor NMDA type | 9 | 101569352-101738647 |
| | | subunit 3A | | |
| GRIN3B | ENSG00000116032 | Glutamate ionotropic receptor NMDA type | 19 | 1000419-1009732 |
| | | subunit 3B | | |
| GRM5 | ENSG00000168959 | Glutamate metabotropic receptor 5 | 11 | 88504576-89065945 |
| GSK3A | ENSG00000105723 | Glycogen synthase kinase 3 alpha | 19 | 42230190-42242625 |
| GSK3B | ENSG00000082701 | Glycogen synthase kinase 3 beta | 3 | 119821321-120094447 |
| GSR | ENSG00000104687 | Glutathione-disulfide reductase | 8 | 30678066-30727846 |
| GSS | ENSG00000100983 | Glutathione synthetase | 20 | 34928432-34956027 |
| GUCY1A2 | ENSG00000152402 | Guanylate cyclase 1 soluble subunit alpha 2 | 11 | 106674019-107018476 |
| GUCY2C | ENSG00000070019 | Guanylate cyclase 2C | 12 | 14612632-14696599 |
| HBA1 | ENSG00000206172 | Hemoglobin subunit alpha 1 | 16 | 176680-177522 |
| HBA2 | ENSG00000188536 | Hemoglobin subunit alpha 2 | 16 | 172876-173710 |
| HBB | ENSG00000244734 | Hemoglobin subunit beta | 11 | 5225464-5229395 |
| HCAR2 | ENSG00000182782 | Hydroxycarboxylic acid receptor 2 | 12 | 122701293-122703357 |
| HCAR3 | ENSG00000255398 | Hydroxycarboxylic acid receptor 3 | 12 | 122714756-122716811 |
| HCK | ENSG00000101336 | HCK proto-oncogene, Src family tyrosine kinase | 20 | 32052188-32101856 |
| HCRTR1 | ENSG00000121764 | Hypocretin receptor 1 | 1 | 31617686-31632518 |
| HCRTR2 | ENSG00000137252 | Hypocretin receptor 2 | 6 | 55106460-55282620 |
| HDAC1 | ENSG00000116478 | Histone deacetylase 1 | 1 | 32292083-32333635 |
| HDAC10 | ENSG00000100429 | Histone deacetylase 10 | 22 | 50245183-50251405 |
| HDAC11 | ENSG00000163517 | Histone deacetylase 11 | 3 | 13479724-13506424 |
| HDAC2 | ENSG00000196591 | Histone deacetylase 2 | 6 | 113933028-114011308 |
| HDAC3 | ENSG00000171720 | Histone deacetylase 3 | 5 | 141620876-141636849 |
| HDAC4 | ENSG00000068024 | Histone deacetylase 4 | 2 | 239048168-239401654 |
| HDAC5 | ENSG00000108840 | Histone deacetylase 5 | 17 | 44076746-44123702 |
| HDAC6 | ENSG00000094631 | Histone deacetylase 6 | X | 48801377-48824982 |
| HDAC7 | ENSG00000061273 | Histone deacetylase 7 | 12 | 47782722-47833132 |
| HDAC8 | ENSG00000147099 | Histone deacetylase 8 | X | 72329516-72573101 |
| HDAC9 | ENSG00000048052 | Histone deacetylase 9 | 7 | 18086949-19002416 |
| HMGCR | ENSG00000113161 | 3-hydroxy-3-methylglutaryl-CoA reductase | 5 | 75336329-75362101 |
| HMMR | ENSG00000072571 | Hyaluronan mediated motility receptor | 5 | 163460203-163491941 |
| HPD | ENSG00000158104 | 4-hydroxyphenylpyruvate dioxygenase | 12 | 121839527-121863596 |
| HPRT1 | ENSG00000165704 | Hypoxanthine phosphoribosyltransferase 1 | X | 134460165-134520513 |
| HPSE | ENSG00000173083 | Heparanase | 4 | 83292461-83335153 |
| HRH1 | ENSG00000196639 | Histamine receptor H1 | 3 | 11137093-11263557 |
| HRH2 | ENSG00000113749 | Histamine receptor H2 | 5 | 175658030-175710756 |
| HRH3 | ENSG00000101180 | Histamine receptor H3 | 20 | 62214960-62220278 |
| HSD3B1 | ENSG00000203857 | Hydroxy-delta-5-steroid dehydrogenase, 3 beta- | 1 | 119507198-119515054 |
| | | and steroid delta-isomerase 1 | | |
| HSD3B2 | ENSG00000203859 | Hydroxy-delta-5-steroid dehydrogenase, 3 beta- | 1 | 119414931-119423035 |
| | | and steroid delta-isomerase 2 | | |
| HSP90AA1 | ENSG00000080824 | Heat shock protein 90 alpha family class A | 14 | 102080742-102139699 |
| | | member 1 | | |
| HSPA1A | ENSG00000204389 | Heat shock protein family A (Hsp70) member 1A | 6 | 31815543-31817946 |
| HSPA1B | ENSG00000204388 | Heat shock protein family A (Hsp70) member 1B | 6 | 31827738-31830254 |
| HSPB1 | ENSG00000106211 | Heat shock protein family B (small) member 1 | 7 | 76302673-76304295 |
| HTR1A | ENSG00000178394 | 5-hydroxytryptamine receptor 1A | 5 | 63957874-63962507 |
| HTR1B | ENSG00000135312 | 5-hydroxytryptamine receptor 1B | 6 | 77460924-77463491 |
| HTR1D | ENSG00000179546 | 5-hydroxytryptamine receptor 1D | 1 | 23191895-23194729 |
| HTR1E | ENSG00000168830 | 5-hydroxytryptamine receptor 1E | 6 | 86937528-87016679 |
| HTR1F | ENSG00000179097 | 5-hydroxytryptamine receptor 1F | 3 | 87990696-87993835 |
| HTR2A | ENSG00000102468 | 5-hydroxytryptamine receptor 2A | 13 | 46831550-46897076 |
| HTR2B | ENSG00000135914 | 5-hydroxytryptamine receptor 2B | 2 | 231108230-231125042 |
| HTR2C | ENSG00000147246 | 5-hydroxytryptamine receptor 2C | X | 114584078-114910061 |
| HTR3A | ENSG00000166736 | 5-hydroxytryptamine receptor 3A | 11 | 113974881-113990313 |
| HTR3B | ENSG00000149305 | 5-hydroxytryptamine receptor 3B | 11 | 113904677-113949078 |
| HTR3C | ENSG00000178084 | 5-hydroxytryptamine receptor 3C | 3 | 184053047-184060673 |
| HTR3D | ENSG00000186090 | 5-hydroxytryptamine receptor 3D | 3 | 184031544-184039369 |
| HTR3E | ENSG00000186038 | 5-hydroxytryptamine receptor 3E | 3 | 184097064-184106995 |
| HTR4 | ENSG00000164270 | 5-hydroxytryptamine receptor 4 | 5 | 148451032-148677235 |
| HTR6 | ENSG00000158748 | 5-hydroxytryptamine receptor 6 | 1 | 19664875-19680966 |
| HTR7 | ENSG00000148680 | 5-hydroxytryptamine receptor 7 | 10 | 90740823-90858039 |
| ICAM1 | ENSG00000090339 | Intercellular adhesion molecule 1 | 19 | 10271093-10286615 |
| IDE | ENSG00000119912 | Insulin degrading enzyme | 10 | 92451684-92574093 |
| IDH1 | ENSG00000138413 | Isocitrate dehydrogenase (NADP(+)) 1 | 2 | 208236227-208266074 |
| IDH2 | ENSG00000182054 | Isocitrate dehydrogenase (NADP(+)) 2 | 15 | 90083045-90102477 |
| IDO1 | ENSG00000131203 | Indoleamine 2,3-dioxygenase 1 | 8 | 39902275-39928790 |
| IFNAR1 | ENSG00000142166 | Interferon alpha and beta receptor subunit 1 | 21 | 33324429-33359864 |
| IFNAR2 | ENSG00000159110 | Interferon alpha and beta receptor subunit 2 | 21 | 33229901-33265675 |
| IFNG | ENSG00000111537 | Interferon gamma | 12 | 68154768-68159740 |
| IFNGR1 | ENSG00000027697 | Interferon gamma receptor 1 | 6 | 137197485-137219449 |
| IFNGR2 | ENSG00000159128 | Interferon gamma receptor 2 | 21 | 33402896-33479348 |
| IGF1R | ENSG00000140443 | Insulin like growth factor 1 receptor | 15 | 98648539-98964530 |
| IHH | ENSG00000163501 | Indian hedgehog signaling molecule | 2 | 219054424-219060921 |
| IKBKB | ENSG00000104365 | Inhibitor of nuclear factor kappa B kinase subunit | 8 | 42271302-42332653 |
| | | beta | | |
| IL11RA | ENSG00000137070 | Interleukin 11 receptor subunit alpha | 9 | 34650702-34661902 |
| IL12B | ENSG00000113302 | Interleukin 12B | 5 | 159314780-159330487 |
| IL17A | ENSG00000112115 | Interleukin 17A | 6 | 52186375-52190638 |
| IL1B | ENSG00000125538 | Interleukin 1 beta | 2 | 112829751-112836816 |
| IL1R1 | ENSG00000115594 | Interleukin 1 receptor type 1 | 2 | 102064544-102179874 |
| IL23A | ENSG00000110944 | Interleukin 23 subunit alpha | 12 | 56334174-56340410 |
| IL2RA | ENSG00000134460 | Interleukin 2 receptor subunit alpha | 10 | 6010689-6062370 |
| IL2RB | ENSG00000100385 | Interleukin 2 receptor subunit beta | 22 | 37125843-37175054 |
| IL2RG | ENSG00000147168 | Interleukin 2 receptor subunit gamma | X | 71107404-71112108 |
| IL3RA | ENSG00000185291 | Interleukin 3 receptor subunit alpha | X | 1336616-1382689 |
| IL5 | ENSG00000113525 | Interleukin 5 | 5 | 132541445-132556838 |
| IL6 | ENSG00000136244 | Interleukin 6 | 7 | 22725884-22732002 |
| IL6R | ENSG00000160712 | Interleukin 6 receptor | 1 | 154405193-154469450 |
| IL6ST | ENSG00000134352 | Interleukin 6 signal transducer | 5 | 55935095-55995022 |
| IMPDH1 | ENSG00000106348 | Inosine monophosphate dehydrogenase 1 | 7 | 128392277-128410252 |
| IMPDH2 | ENSG00000178035 | Inosine monophosphate dehydrogenase 2 | 3 | 49024325-49029408 |
| INHA | ENSG00000123999 | Inhibin subunit alpha | 2 | 219569162-219575711 |
| INHBA | ENSG00000122641 | Inhibin subunit beta A | 7 | 41667168-41705834 |
| INHBB | ENSG00000163083 | Inhibin subunit beta B | 2 | 120346136-120351803 |
| INHBC | ENSG00000175189 | Inhibin subunit beta C | 12 | 57434784-57452062 |
| INHBE | ENSG00000139269 | Inhibin subunit beta E | 12 | 57452323-57459280 |
| INSR | ENSG00000171105 | Insulin receptor | 19 | 7112255-7294414 |
| ITGA2B | ENSG00000005961 | Integrin subunit alpha 2b | 17 | 44372180-44389649 |
| ITGA4 | ENSG00000115232 | Integrin subunit alpha 4 | 2 | 181457202-181538940 |
| ITGAL | ENSG00000005844 | Integrin subunit alpha L | 16 | 30472719-30523185 |
| ITGAV | ENSG00000138448 | Integrin subunit alpha V | 2 | 186590056-186680901 |
| ITGB1 | ENSG00000150093 | Integrin subunit beta 1 | 10 | 32900318-33005792 |
| ITGB3 | ENSG00000259207 | Integrin subunit beta 3 | 17 | 47253827-47313743 |
| ITGB7 | ENSG00000139626 | Integrin subunit beta 7 | 12 | 53191323-53207282 |
| ITK | ENSG00000113263 | IL2 inducible T cell kinase | 5 | 157142933-157255185 |
| JAK1 | ENSG00000162434 | Janus kinase 1 | 1 | 64833229-65067754 |
| JAK2 | ENSG00000096968 | Janus kinase 2 | 9 | 4984390-5129948 |
| JAK3 | ENSG00000105639 | Janus kinase 3 | 19 | 17824780-17848071 |
| JUN | ENSG00000177606 | Jun proto-oncogene, AP-1 transcription factor | 1 | 58780791-58784047 |
| | | subunit | | |
| KCNA1 | ENSG00000111262 | Potassium voltage-gated channel subfamily A | 12 | 4909905-4918256 |
| | | member 1 | | |
| KCNA10 | ENSG00000143105 | Potassium voltage-gated channel subfamily A | 1 | 110517217-110519175 |
| | | member 10 | | |
| KCNA2 | ENSG00000177301 | Potassium voltage-gated channel subfamily A | 1 | 110519837-110631474 |
| | | member 2 | | |
| KCNA3 | ENSG00000177272 | Potassium voltage-gated channel subfamily A | 1 | 110672465-110674940 |
| | | member 3 | | |
| KCNA4 | ENSG00000182255 | Potassium voltage-gated channel subfamily A | 11 | 30009730-30017030 |
| | | member 4 | | |
| KCNA5 | ENSG00000130037 | Potassium voltage-gated channel subfamily A | 12 | 5043879-5046788 |
| | | member 5 | | |
| KCNA6 | ENSG00000151079 | Potassium voltage-gated channel subfamily A | 12 | 4809176-4813412 |
| | | member 6 | | |
| KCNA7 | ENSG00000104848 | Potassium voltage-gated channel subfamily A | 19 | 49067418-49072941 |
| | | member 7 | | |
| KCNB1 | ENSG00000158445 | Potassium voltage-gated channel subfamily B | 20 | 49293394-49484297 |
| | | member 1 | | |
| KCNB2 | ENSG00000182674 | Potassium voltage-gated channel subfamily B | 8 | 72537225-72938349 |
| | | member 2 | | |
| KCNC1 | ENSG00000129159 | Potassium voltage-gated channel subfamily C | 11 | 17734774-17856804 |
| | | member 1 | | |
| KCNC2 | ENSG00000166006 | Potassium voltage-gated channel subfamily C | 12 | 75040077-75209839 |
| | | member 2 | | |
| KCNC3 | ENSG00000131398 | Potassium voltage-gated channel subfamily C | 19 | 50311937-50333515 |
| | | member 3 | | |
| KCND1 | ENSG00000102057 | Potassium voltage-gated channel subfamily D | X | 48961378-48971844 |
| | | member 1 | | |
| KCND2 | ENSG00000184408 | Potassium voltage-gated channel subfamily D | 7 | 120273175-120750337 |
| | | member 2 | | |
| KCND3 | ENSG00000171385 | Potassium voltage-gated channel subfamily D | 1 | 111770662-111989155 |
| | | member 3 | | |
| KCNE1 | ENSG00000180509 | Potassium voltage-gated channel subfamily E | 21 | 34446688-34512210 |
| | | regulatory subunit 1 | | |
| KCNH2 | ENSG00000055118 | Potassium voltage-gated channel subfamily H | 7 | 150944961-150978321 |
| | | member 2 | | |
| KCNJ1 | ENSG00000151704 | Potassium inwardly rectifying channel subfamily | 11 | 128836315-128867373 |
| | | J member 1 | | |
| KCNJ11 | ENSG00000187486 | Potassium inwardly rectifying channel subfamily | 11 | 17385859-17389331 |
| | | J member 11 | | |
| KCNJ12 | ENSG00000184185 | Potassium inwardly rectifying channel subfamily | 17 | 21376357-21419870 |
| | | J member 12 | | |
| KCNJ8 | ENSG00000121361 | Potassium inwardly rectifying channel subfamily | 12 | 21764955-21775600 |
| | | J member 8 | | |
| KCNK2 | ENSG00000082482 | Potassium two pore domain channel subfamily K | 1 | 215005775-215237093 |
| | | member 2 | | |
| KCNK3 | ENSG00000171303 | Potassium two pore domain channel subfamily K | 2 | 26692690-26733420 |
| | | member 3 | | |
| KCNK9 | ENSG00000169427 | Potassium two pore domain channel subfamily K | 8 | 139600838-139704109 |
| | | member 9 | | |
| KCNMA1 | ENSG00000156113 | Potassium calcium-activated channel subfamily | 10 | 76869601-77638369 |
| | | M alpha 1 | | |
| KCNN4 | ENSG00000104783 | Potassium calcium-activated channel subfamily | 19 | 43766533-43781257 |
| | | N member 4 | | |
| KCNQ1 | ENSG00000053918 | Potassium voltage-gated channel subfamily Q | 11 | 2444684-2849105 |
| | | member 1 | | |
| KCNQ2 | ENSG00000075043 | Potassium voltage-gated channel subfamily Q | 20 | 63400210-63472677 |
| | | member 2 | | |
| KCNQ3 | ENSG00000184156 | Potassium voltage-gated channel subfamily Q | 8 | 132120859-132481095 |
| | | member 3 | | |
| KDM1A | ENSG00000004487 | Lysine demethylase 1A | 1 | 23019443-23083689 |
| KDR | ENSG00000128052 | Kinase insert domain receptor | 4 | 55078481-55125595 |
| KEAP1 | ENSG00000079999 | Kelch like ECH associated protein 1 | 19 | 10486125-10503558 |
| KIF11 | ENSG00000138160 | Kinesin family member 11 | 10 | 92593130-92655395 |
| KIT | ENSG00000157404 | KIT proto-oncogene, receptor tyrosine kinase | 4 | 54657918-54740715 |
| KLKB1 | ENSG00000164344 | Kallikrein B1 | 4 | 186208979-186258471 |
| KRAS | ENSG00000133703 | KRAS proto-oncogene, GTPase | 12 | 25205246-25250936 |
| LAP3 | ENSG00000002549 | Leucine aminopeptidase 3 | 4 | 17577192-17607972 |
| LCK | ENSG00000182866 | LCK proto-oncogene, Src family tyrosine kinase | 1 | 32251239-32286165 |
| LDLR | ENSG00000130164 | Low density lipoprotein receptor | 19 | 11089462-11133820 |
| LEPR | ENSG00000116678 | Leptin receptor | 1 | 65420652-65641559 |
| LHCGR | ENSG00000138039 | Luteinizing hormone/choriogonadotropin | 2 | 48686774-48755730 |
| | | receptor | | |
| LIMK1 | ENSG00000106683 | LIM domain kinase 1 | 7 | 74082933-74122525 |
| LIPF | ENSG00000182333 | Lipase F, gastric type | 10 | 88664441-88678814 |
| LPL | ENSG00000175445 | Lipoprotein lipase | 8 | 19901717-19967259 |
| LYN | ENSG00000254087 | LYN proto-oncogene, Src family tyrosine kinase | 8 | 55879835-56014169 |
| M6PR | ENSG00000003056 | Mannose-6-phosphate receptor, cation dependent | 12 | 8940361-8949761 |
| MAOA | ENSG00000189221 | Monoamine oxidase A | X | 43654907-43746824 |
| MAOB | ENSG00000069535 | Monoamine oxidase B | X | 43766610-43882450 |
| MAP1A | ENSG00000166963 | Microtubule associated protein 1A | 15 | 43510958-43531620 |
| MAP2 | ENSG00000078018 | Microtubule associated protein 2 | 2 | 209424058-209734118 |
| MAP2K1 | ENSG00000169032 | Mitogen-activated protein kinase kinase 1 | 15 | 66386837-66491544 |
| MAP2K2 | ENSG00000126934 | Mitogen-activated protein kinase kinase 2 | 19 | 4090321-4124122 |
| MAP3K7 | ENSG00000135341 | Mitogen-activated protein kinase kinase kinase 7 | 6 | 90513573-90587072 |
| MAP3K8 | ENSG00000107968 | Mitogen-activated protein kinase kinase kinase 8 | 10 | 30434021-30461833 |
| MAP4 | ENSG00000047849 | Microtubule associated protein 4 | 3 | 47850690-48089272 |
| MAPK1 | ENSG00000100030 | Mitogen-activated protein kinase 1 | 22 | 21759657-21867680 |
| MAPK11 | ENSG00000185386 | Mitogen-activated protein kinase 11 | 22 | 50263713-50270767 |
| MAPK14 | ENSG00000112062 | Mitogen-activated protein kinase 14 | 6 | 36027677-36111236 |
| MAPK3 | ENSG00000102882 | Mitogen-activated protein kinase 3 | 16 | 30114105-30123506 |
| MAPK8 | ENSG00000107643 | Mitogen-activated protein kinase 8 | 10 | 48306639-48439360 |
| MAPK9 | ENSG00000050748 | Mitogen-activated protein kinase 9 | 5 | 180233143-180292099 |
| MAPT | ENSG00000186868 | Microtubule associated protein tau | 17 | 45894382-46028334 |
| MC2R | ENSG00000185231 | Melanocortin 2 receptor | 18 | 13882044-13915707 |
| MCL1 | ENSG00000143384 | MCL1 apoptosis regulator, BCL2 family member | 1 | 150574551-150579738 |
| MDM2 | ENSG00000135679 | MDM2 proto-oncogene | 12 | 68808177-68850686 |
| MET | ENSG00000105976 | MET proto-oncogene, receptor tyrosine kinase | 7 | 116672196-116798386 |
| METAP2 | ENSG00000111142 | Methionyl aminopeptidase 2 | 12 | 95473520-95515839 |
| MGAM | ENSG00000257335 | Maltase-glucoamylase | 7 | 141907813-142106747 |
| MGMT | ENSG00000170430 | O-6-methylguanine-DNA methyltransferase | 10 | 129467190-129770983 |
| MME | ENSG00000196549 | Membrane metalloendopeptidase | 3 | 155024124-155183729 |
| MMP1 | ENSG00000196611 | Matrix metallopeptidase 1 | 11 | 102789919-102798160 |
| MMP10 | ENSG00000166670 | Matrix metallopeptidase 10 | 11 | 102770502-102780628 |
| MMP11 | ENSG00000099953 | Matrix metallopeptidase 11 | 22 | 23768226-23784316 |
| MMP12 | ENSG00000262406 | Matrix metallopeptidase 12 | 11 | 102862736-102874982 |
| MMP13 | ENSG00000137745 | Matrix metallopeptidase 13 | 11 | 102942995-102955732 |
| MMP14 | ENSG00000157227 | Matrix metallopeptidase 14 | 14 | 22836560-22849027 |
| MMP15 | ENSG00000102996 | Matrix metallopeptidase 15 | 16 | 58025754-58046901 |
| MMP16 | ENSG00000156103 | Matrix metallopeptidase 16 | 8 | 88032011-88328025 |
| MMP17 | ENSG00000198598 | Matrix metallopeptidase 17 | 12 | 131828393-131851783 |
| MMP19 | ENSG00000123342 | Matrix metallopeptidase 19 | 12 | 55835433-55842966 |
| MMP2 | ENSG00000087245 | Matrix metallopeptidase 2 | 16 | 55389700-55506691 |
| MMP20 | ENSG00000137674 | Matrix metallopeptidase 20 | 11 | 102576832-102625332 |
| MMP21 | ENSG00000154485 | Matrix metallopeptidase 21 | 10 | 125753580-125775821 |
| MMP23B | ENSG00000189409 | Matrix metallopeptidase 23B | 1 | 1632163-1635263 |
| MMP24 | ENSG00000125966 | Matrix metallopeptidase 24 | 20 | 35226690-35276998 |
| MMP25 | ENSG00000008516 | Matrix metallopeptidase 25 | 16 | 3046561-3060726 |
| MMP26 | ENSG00000167346 | Matrix metallopeptidase 26 | 11 | 4704927-4992429 |
| MMP27 | ENSG00000137675 | Matrix metallopeptidase 27 | 11 | 102691487-102705769 |
| MMP28 | ENSG00000271447 | Matrix metallopeptidase 28 | 17 | 35756249-35795707 |
| MMP3 | ENSG00000149968 | Matrix metallopeptidase 3 | 11 | 102835801-102843609 |
| MMP7 | ENSG00000137673 | Matrix metallopeptidase 7 | 11 | 102520508-102530750 |
| MMP8 | ENSG00000118113 | Matrix metallopeptidase 8 | 11 | 102711796-102727050 |
| MMP9 | ENSG00000100985 | Matrix metallopeptidase 9 | 20 | 46008908-46016561 |
| MPL | ENSG00000117400 | MPL proto-oncogene, thrombopoietin receptor | 1 | 43337818-43354466 |
| MR1 | ENSG00000153029 | Major histocompatibility complex, class I-related | 1 | 181033425-181061938 |
| MS4A1 | ENSG00000156738 | Membrane spanning 4-domains A1 | 11 | 60455846-60470752 |
| MS4A2 | ENSG00000149534 | Membrane spanning 4-domains A2 | 11 | 60088261-60098467 |
| MSLN | ENSG00000102854 | Mesothelin | 16 | 760734-768865 |
| MST1R | ENSG00000164078 | Macrophage stimulating 1 receptor | 3 | 49887002-49903873 |
| MTNR1A | ENSG00000168412 | Melatonin receptor 1A | 4 | 186533655-186555567 |
| MTNR1B | ENSG00000134640 | Melatonin receptor 1B | 11 | 92969720-92985066 |
| MTOR | ENSG00000198793 | Mechanistic target of rapamycin kinase | 1 | 11106535-11262551 |
| MTR | ENSG00000116984 | 5-methyltetrahydrofolate-homocysteine | 1 | 236795292-236921278 |
| | | methyltransferase | | |
| MTTP | ENSG00000138823 | Microsomal triglyceride transfer protein | 4 | 99563761-99623999 |
| MUC5AC | ENSG00000215182 | Mucin 5AC, oligomeric mucus/gel-forming | 11 | 1157953-1201138 |
| MUTT | ENSG00000146085 | Methylmalonyl-CoA mutase | 6 | 49430360-49463191 |
| NAE1 | ENSG00000159593 | NEDD8 activating enzyme E1 subunit 1 | 16 | 66802875-66873256 |
| NAMPT | ENSG00000105835 | Nicotinamide phosphoribosyltransferase | 7 | 106248298-106286326 |
| NBN | ENSG00000104320 | Nibrin | 8 | 89933331-90003228 |
| NCSTN | ENSG00000162736 | Nicastrin | 1 | 160343316-160358952 |
| NEK11 | ENSG00000114670 | NIMA related kinase 11 | 3 | 131026850-131350465 |
| NFKB1 | ENSG00000109320 | Nuclear factor kappa B subunit 1 | 4 | 102501331-102617302 |
| NISCH | ENSG00000010322 | Nischarin | 3 | 52455118-52493068 |
| NNMT | ENSG00000166741 | Nicotinamide N-methyltransferase | 11 | 114257787-114313285 |
| NOS2 | ENSG00000007171 | Nitric oxide synthase 2 | 17 | 27756766-27800529 |
| NOS3 | ENSG00000164867 | Nitric oxide synthase 3 | 7 | 150991017-151014588 |
| NOTCH1 | ENSG00000148400 | Notch receptor 1 | 9 | 136494433-136546048 |
| NOTCH2 | ENSG00000134250 | Notch receptor 2 | 1 | 119911553-120100779 |
| NOTCH3 | ENSG00000074181 | Notch receptor 3 | 19 | 15159038-15200995 |
| NOTCH4 | ENSG00000204301 | Notch receptor 4 | 6 | 32194843-32224067 |
| NOXO1 | ENSG00000196408 | NADPH oxidase organizer 1 | 16 | 1978917-1984192 |
| NPC1L1 | ENSG00000015520 | NPC1 like intracellular cholesterol transporter 1 | 7 | 44512535-44541315 |
| NPEPPS | ENSG00000141279 | Aminopeptidase puromycin sensitive | 17 | 47522942-47623276 |
| NPR1 | ENSG00000169418 | Natriuretic peptide receptor 1 | 1 | 153678688-153693992 |
| NPR2 | ENSG00000159899 | Natriuretic peptide receptor 2 | 9 | 35792154-35809732 |
| NR1H4 | ENSG00000012504 | Nuclear receptor subfamily 1 group H member 4 | 12 | 100473708-100564414 |
| NR1I2 | ENSG00000144852 | Nuclear receptor subfamily 1 group I member 2 | 3 | 119780484-119818485 |
| NR3C1 | ENSG00000113580 | Nuclear receptor subfamily 3 group C member 1 | 5 | 143277931-143435512 |
| NR3C2 | ENSG00000151623 | Nuclear receptor subfamily 3 group C member 2 | 4 | 148078762-148444698 |
| NRAS | ENSG00000213281 | NRAS proto-oncogene, GTPase | 1 | 114704469-114716771 |
| NTRK1 | ENSG00000198400 | Neurotrophic receptor tyrosine kinase 1 | 1 | 156815640-156881850 |
| NTRK2 | ENSG00000148053 | Neurotrophic receptor tyrosine kinase 2 | 9 | 84668551-85027070 |
| NTRK3 | ENSG00000140538 | Neurotrophic receptor tyrosine kinase 3 | 15 | 87859751-88256768 |
| NTSR2 | ENSG00000169006 | Neurotensin receptor 2 | 2 | 11658178-11670195 |
| ODC1 | ENSG00000115758 | Ornithine decarboxylase 1 | 2 | 10439968-10448327 |
| OPRD1 | ENSG00000116329 | Opioid receptor delta 1 | 1 | 28812142-28871267 |
| OPRK1 | ENSG00000082556 | Opioid receptor kappa 1 | 8 | 53225716-53251697 |
| OPRM1 | ENSG00000112038 | Opioid receptor mu 1 | 6 | 154010496-154246867 |
| OXTR | ENSG00000180914 | Oxytocin receptor | 3 | 8750408-8769628 |
| P2RX4 | ENSG00000135124 | Purinergic receptor P2X 4 | 12 | 121209857-121234106 |
| P2RY12 | ENSG00000169313 | Purinergic receptor P2Y12 | 3 | 151336843-151384753 |
| P2RY2 | ENSG00000175591 | Purinergic receptor P2Y2 | 11 | 73218298-73236352 |
| PAH | ENSG00000171759 | Phenylalanine hydroxylase | 12 | 102836889-102958410 |
| PARP1 | ENSG00000143799 | Poly(ADP-ribose) polymerase 1 | 1 | 226360691-226408093 |
| PARP2 | ENSG00000129484 | Poly(ADP-ribose) polymerase 2 | 14 | 20343582-20357905 |
| PARP3 | ENSG00000041880 | Poly(ADP-ribose) polymerase family member 3 | 3 | 51942345-51948867 |
| PCSK9 | ENSG00000169174 | Proprotein convertase subtilisin/kexin type 9 | 1 | 55039447-55064852 |
| PDCD1 | ENSG00000188389 | Programmed cell death 1 | 2 | 241849884-241858894 |
| PDE10A | ENSG00000112541 | Phosphodiesterase 10A | 6 | 165327287-165988078 |
| PDE3A | ENSG00000172572 | Phosphodiesterase 3A | 12 | 20369245-20684381 |
| PDE4A | ENSG00000065989 | Phosphodiesterase 4A | 19 | 10416773-10469630 |
| PDE4B | ENSG00000184588 | Phosphodiesterase 4B | 1 | 65792514-66374579 |
| PDE4C | ENSG00000105650 | Phosphodiesterase 4C | 19 | 18208652-18248200 |
| PDE4D | ENSG00000113448 | Phosphodiesterase 4D | 5 | 58969038-60522120 |
| PDE5A | ENSG00000138735 | Phosphodiesterase 5A | 4 | 119494397-119628804 |
| PDE7A | ENSG00000205268 | Phosphodiesterase 7A | 8 | 65714334-65842322 |
| PDE7B | ENSG00000171408 | Phosphodiesterase 7B | 6 | 135851701-136195574 |
| PDGFRA | ENSG00000134853 | Platelet derived growth factor receptor alpha | 4 | 54229280-54298245 |
| PDGFRB | ENSG00000113721 | Platelet derived growth factor receptor beta | 5 | 150113839-150155872 |
| PDXK | ENSG00000160209 | Pyridoxal kinase | 21 | 43719094-43762307 |
| PGF | ENSG00000119630 | Placental growth factor | 14 | 74941834-74955626 |
| PGR | ENSG00000082175 | Progesterone receptor | 11 | 101029624-101129813 |
| PIGF | ENSG00000151665 | Phosphatidylinositol glycan anchor biosynthesis | 2 | 46580937-46617055 |
| | | class F | | |
| PIK3CA | ENSG00000121879 | Phosphatidylinositol-4,5-bisphosphate 3-kinase | 3 | 179148114-179240093 |
| | | catalytic subunit alpha | | |
| PIK3CB | ENSG00000051382 | Phosphatidylinositol-4,5-bisphosphate 3-kinase | 3 | 138652698-138834928 |
| | | catalytic subunit beta | | |
| PIK3CD | ENSG00000171608 | Phosphatidylinositol-4,5-bisphosphate 3-kinase | 1 | 9651731-9729114 |
| | | catalytic subunit delta | | |
| PIK3CG | ENSG00000105851 | Phosphatidylinositol-4,5-bisphosphate 3-kinase | 7 | 106865278-106908980 |
| | | catalytic subunit gamma | | |
| PIM1 | ENSG00000137193 | Pim-1 proto-oncogene, serine/threonine kinase | 6 | 37170152-37175428 |
| PIM2 | ENSG00000102096 | Pim-2 proto-oncogene, serine/threonine kinase | X | 48913182-48919024 |
| PIM3 | ENSG00000198355 | Pim-3 proto-oncogene, serine/threonine kinase | 22 | 49960768-49964072 |
| PLA2G1B | ENSG00000170890 | Phospholipase A2 group IB | 12 | 120322115-120327779 |
| PLA2G2A | ENSG00000188257 | Phospholipase A2 group IIA | 1 | 19975431-19980416 |
| PLA2G4A | ENSG00000116711 | Phospholipase A2 group IVA | 1 | 186828949-186988981 |
| PLA2G6 | ENSG00000184381 | Phospholipase A2 group VI | 22 | 38111495-38214778 |
| PLAT | ENSG00000104368 | Plasminogen activator, tissue type | 8 | 42174718-42207676 |
| PLAU | ENSG00000122861 | Plasminogen activator, urokinase | 10 | 73909177-73917496 |
| PLAUR | ENSG00000011422 | Plasminogen activator, urokinase receptor | 19 | 43646095-43670547 |
| PLCL1 | ENSG00000115896 | Phospholipase C like 1 (inactive) | 2 | 197804593-198572581 |
| PLG | ENSG00000122194 | Plasminogen | 6 | 160702238-160753315 |
| PLIN3 | ENSG00000105355 | Perilipin 3 | 19 | 4838341-4867694 |
| PLK1 | ENSG00000166851 | Polo like kinase 1 | 16 | 23677656-23690367 |
| PLK2 | ENSG00000145632 | Polo like kinase 2 | 5 | 58453982-58460139 |
| PLK3 | ENSG00000173846 | Polo like kinase 3 | 1 | 44800377-44805990 |
| PNLIP | ENSG00000175535 | Pancreatic lipase | 10 | 116545931-116567855 |
| PNP | ENSG00000198805 | Purine nucleoside phosphorylase | 14 | 20468954-20477089 |
| POLA1 | ENSG00000101868 | DNA polymerase alpha 1, catalytic subunit | X | 24693909-24996986 |
| POLB | ENSG00000070501 | DNA polymerase beta | 8 | 42338454-42371808 |
| POLE | ENSG00000177084 | DNA polymerase epsilon, catalytic subunit | 12 | 132623753-132687376 |
| POLE2 | ENSG00000100479 | DNA polymerase epsilon 2, accessory subunit | 14 | 49643555-49688422 |
| POLE3 | ENSG00000148229 | DNA polymerase epsilon 3, accessory subunit | 9 | 113407235-113410675 |
| POLE4 | ENSG00000115350 | DNA polymerase epsilon 4, accessory subunit | 2 | 74958643-74970128 |
| PORCN | ENSG00000102312 | Porcupine O-acyltransferase | X | 48508962-48520814 |
| PPARA | ENSG00000186951 | Peroxisome proliferator activated receptor alpha | 22 | 46150521-46243756 |
| PPARD | ENSG00000112033 | Peroxisome proliferator activated receptor delta | 6 | 35342558-35428191 |
| PPARG | ENSG00000132170 | Peroxisome proliferator activated receptor | 3 | 12287368-12434356 |
| | | gamma | | |
| PPP2CA | ENSG00000113575 | Protein phosphatase 2 catalytic subunit alpha | 5 | 134194332-134226073 |
| PPP3R2 | ENSG00000188386 | Protein phosphatase 3 regulatory subunit B, beta | 9 | 101591604-101595021 |
| PRDX5 | ENSG00000126432 | Peroxiredoxin 5 | 11 | 64318121-64321811 |
| PRKAA1 | ENSG00000132356 | Protein kinase AMP-activated catalytic subunit | 5 | 40759379-40798374 |
| | | alpha 1 | | |
| PRKAB1 | ENSG00000111725 | Protein kinase AMP-activated non-catalytic | 12 | 119667864-119681624 |
| | | subunit beta 1 | | |
| PRKCA | ENSG00000154229 | Protein kinase C alpha | 17 | 66302613-66810743 |
| PRKCB | ENSG00000166501 | Protein kinase C beta | 16 | 23835983-24220611 |
| PRKCE | ENSG00000171132 | Protein kinase C epsilon | 2 | 45651345-46187990 |
| PRKCG | ENSG00000126583 | Protein kinase C gamma | 19 | 53879190-53907652 |
| PRKCI | ENSG00000163558 | Protein kinase C iota | 3 | 170222424-170305977 |
| PRKDC | ENSG00000253729 | Protein kinase, DNA-activated, catalytic subunit | 8 | 47773111-47960178 |
| PRLR | ENSG00000113494 | Prolactin receptor | 5 | 35048756-35230487 |
| PRMT5 | ENSG00000100462 | Protein arginine methyltransferase 5 | 14 | 22920525-22929408 |
| PROC | ENSG00000115718 | Protein C, inactivator of coagulation factors Va | 2 | 127418427-127429242 |
| | | and Villa | | |
| PROS1 | ENSG00000184500 | Protein S | 3 | 93873051-93980003 |
| PSEN1 | ENSG00000080815 | Presenilin 1 | 14 | 73136418-73223691 |
| PSENEN | ENSG00000205155 | Presenilin enhancer, gamma-secretase subunit | 19 | 35745600-35747519 |
| PSMB1 | ENSG00000008018 | Proteasome 20S subunit beta 1 | 6 | 170535120-170553307 |
| PSMB10 | ENSG00000205220 | Proteasome 20S subunit beta 10 | 16 | 67934506-67936864 |
| PSMB2 | ENSG00000126067 | Proteasome 20S subunit beta 2 | 1 | 35599541-35641526 |
| PSMB5 | ENSG00000100804 | Proteasome 20S subunit beta 5 | 14 | 23016543-23035230 |
| PSMB8 | ENSG00000204264 | Proteasome 20S subunit beta 8 | 6 | 32840717-32844679 |
| PSMB9 | ENSG00000240065 | Proteasome 20S subunit beta 9 | 6 | 32844136-32859851 |
| PSMD1 | ENSG00000173692 | Proteasome 26S subunit, non-ATPase 1 | 2 | 231056864-231172827 |
| PSMD2 | ENSG00000175166 | Proteasome 26S subunit, non-ATPase 2 | 3 | 184299198-184309050 |
| PTCH1 | ENSG00000185920 | Patched 1 | 9 | 95442980-95517057 |
| PTGER1 | ENSG00000160951 | Prostaglandin E receptor 1 | 19 | 14472466-14475354 |
| PTGER2 | ENSG00000125384 | Prostaglandin E receptor 2 | 14 | 52314305-52328598 |
| PTGER3 | ENSG00000050628 | Prostaglandin E receptor 3 | 1 | 70852353-71047808 |
| PTGER4 | ENSG00000171522 | Prostaglandin E receptor 4 | 5 | 40679915-40693735 |
| PTGFR | ENSG00000122420 | Prostaglandin F receptor | 1 | 78303884-78540701 |
| PTGIR | ENSG00000160013 | Prostaglandin I2 receptor | 19 | 46620468-46625089 |
| PTGIS | ENSG00000124212 | Prostaglandin I2 synthase | 20 | 49503874-49568137 |
| PTGS1 | ENSG00000095303 | Prostaglandin-endoperoxide synthase 1 | 9 | 122370530-122395703 |
| PTGS2 | ENSG00000073756 | Prostaglandin-endoperoxide synthase 2 | 1 | 186671791-186680423 |
| PTH2R | ENSG00000144407 | Parathyroid hormone 2 receptor | 2 | 208359714-208854503 |
| PTK2 | ENSG00000169398 | Protein tyrosine kinase 2 | 8 | 140657900-141002216 |
| PTK6 | ENSG00000101213 | Protein tyrosine kinase 6 | 20 | 63528001-63537376 |
| QPRT | ENSG00000103485 | Quinolinate phosphoribosyltransferase | 16 | 29663279-29698699 |
| RAC1 | ENSG00000136238 | Rac family small GTPase 1 | 7 | 6374527-6403967 |
| RAD50 | ENSG00000113522 | RAD50 double strand break repair protein | 5 | 132556019-132646349 |
| RAF1 | ENSG00000132155 | Raf-1 proto-oncogene, serine/threonine kinase | 3 | 12583601-12664226 |
| RAMP1 | ENSG00000132329 | Receptor activity modifying protein 1 | 2 | 237858893-237912106 |
| RAMP2 | ENSG00000131477 | Receptor activity modifying protein 2 | 17 | 42758447-42763041 |
| RAMP3 | ENSG00000122679 | Receptor activity modifying protein 3 | 7 | 45157791-45186302 |
| RARA | ENSG00000131759 | Retinoic acid receptor alpha | 17 | 40309180-40357643 |
| RARB | ENSG00000077092 | Retinoic acid receptor beta | 3 | 25174332-25597932 |
| RARG | ENSG00000172819 | Retinoic acid receptor gamma | 12 | 53210567-53232980 |
| RBM39 | ENSG00000131051 | RNA binding motif protein 39 | 20 | 35701347-35742312 |
| REN | ENSG00000143839 | Renin | 1 | 204154819-204190324 |
| RET | ENSG00000165731 | Ret proto-oncogene | 10 | 43077064-43130351 |
| RFK | ENSG00000135002 | Riboflavin kinase | 9 | 76385526-76394517 |
| RICTOR | ENSG00000164327 | RPTOR independent companion of MTOR | 5 | 38937920-39074399 |
| | | complex 2 | | |
| ROCK1 | ENSG00000067900 | Rho associated coiled-coil containing protein | 18 | 20946906-21111813 |
| | | kinase 1 | | |
| ROCK2 | ENSG00000134318 | Rho associated coiled-coil containing protein | 2 | 11179759-11348330 |
| | | kinase 2 | | |
| ROS1 | ENSG00000047936 | ROS proto-oncogene 1, receptor tyrosine kinase | 6 | 117288300-117425855 |
| RPL3 | ENSG00000100316 | Ribosomal protein L3 | 22 | 39312882-39320389 |
| RPS6KB1 | ENSG00000108443 | Ribosomal protein S6 kinase B1 | 17 | 59893046-59950574 |
| RPTOR | ENSG00000141564 | Regulatory associated protein of MTOR complex | 17 | 80544819-80966371 |
| | | 1 | | |
| RRM1 | ENSG00000167325 | Ribonucleotide reductase catalytic subunit M1 | 11 | 4094707-4138932 |
| RRM2 | ENSG00000171848 | Ribonucleotide reductase regulatory subunit M2 | 2 | 10120698-10211725 |
| RRM2B | ENSG00000048392 | Ribonucleotide reductase regulatory TP53 | 8 | 102204502-102238961 |
| | | inducible subunit M2B | | |
| RXRA | ENSG00000186350 | Retinoid X receptor alpha | 9 | 134317098-134440585 |
| RXRB | ENSG00000204231 | Retinoid X receptor beta | 6 | 33193588-33200688 |
| RXRG | ENSG00000143171 | Retinoid X receptor gamma | 1 | 165400922-165445355 |
| RYR1 | ENSG00000196218 | Ryanodine receptor 1 | 19 | 38433691-38587564 |
| RYR2 | ENSG00000198626 | Ryanodine receptor 2 | 1 | 237042184-237833988 |
| S1PR1 | ENSG00000170989 | Sphingosine-1-phosphate receptor 1 | 1 | 101236865-101243713 |
| S1PR5 | ENSG00000180739 | Sphingosine-1-phosphate receptor 5 | 19 | 10512742-10517931 |
| SCN10A | ENSG00000185313 | Sodium voltage-gated channel alpha subunit 10 | 3 | 38696802-38816286 |
| SCN11A | ENSG00000168356 | Sodium voltage-gated channel alpha subunit 11 | 3 | 38845767-39051941 |
| SCN1A | ENSG00000144285 | Sodium voltage-gated channel alpha subunit 1 | 2 | 165984641-166149214 |
| SCN1B | ENSG00000105711 | Sodium voltage-gated channel beta subunit 1 | 19 | 35030470-35040449 |
| SCN2A | ENSG00000136531 | Sodium voltage-gated channel alpha subunit 2 | 2 | 165194993-165392310 |
| SCN2B | ENSG00000149575 | Sodium voltage-gated channel beta subunit 2 | 11 | 118162806-118176639 |
| SCN3A | ENSG00000153253 | Sodium voltage-gated channel alpha subunit 3 | 2 | 165087522-165204067 |
| SCN3B | ENSG00000166257 | Sodium voltage-gated channel beta subunit 3 | 11 | 123629187-123655244 |
| SCN4A | ENSG00000007314 | Sodium voltage-gated channel alpha subunit 4 | 17 | 63938554-63972918 |
| SCN4B | ENSG00000177098 | Sodium voltage-gated channel beta subunit 4 | 11 | 118133377-118152888 |
| SCN5A | ENSG00000183873 | Sodium voltage-gated channel alpha subunit 5 | 3 | 38548057-38649687 |
| SCN9A | ENSG00000169432 | Sodium voltage-gated channel alpha subunit 9 | 2 | 166195185-166376001 |
| SCNN1A | ENSG00000111319 | Sodium channel epithelial 1 subunit alpha | 12 | 6346843-6377730 |
| SCNN1B | ENSG00000168447 | Sodium channel epithelial 1 subunit beta | 16 | 23278231-23381294 |
| SCNN1D | ENSG00000162572 | Sodium channel epithelial 1 subunit delta | 1 | 1280436-1292029 |
| SCNN1G | ENSG00000166828 | Sodium channel epithelial 1 subunit gamma | 16 | 23182745-23216883 |
| SCTR | ENSG00000080293 | Secretin receptor | 2 | 119439843-119525301 |
| SDHD | ENSG00000204370 | Succinate dehydrogenase complex subunit D | 11 | 112086824-112120016 |
| SERPINB2 | ENSG00000197632 | Serpin family B member 2 | 18 | 63871692-63903888 |
| SERPINC1 | ENSG00000117601 | Serpin family C member 1 | 1 | 173903804-173917378 |
| SERPIND1 | ENSG00000099937 | Serpin family D member 1 | 22 | 20774113-20787720 |
| SERPINE1 | ENSG00000106366 | Serpin family E member 1 | 7 | 101127104-101139247 |
| SH2B3 | ENSG00000111252 | SH2B adaptor protein 3 | 12 | 111405923-111451623 |
| SHH | ENSG00000164690 | Sonic hedgehog signaling molecule | 7 | 155799980-155812463 |
| SHMT1 | ENSG00000176974 | Serine hydroxymethyltransferase 1 | 17 | 18327860-18363563 |
| SI | ENSG00000090402 | Sucrase-isomaltase | 3 | 164978898-165078496 |
| SIGMAR1 | ENSG00000147955 | Sigma non-opioid intracellular receptor 1 | 9 | 34634722-34637809 |
| SIK1 | ENSG00000142178 | Salt inducible kinase 1 | 21 | 43414483-43427131 |
| SIRT1 | ENSG00000096717 | Sirtuin 1 | 10 | 67884656-67918390 |
| SIRT5 | ENSG00000124523 | Sirtuin 5 | 6 | 13574529-13615158 |
| SLAMF7 | ENSG00000026751 | SLAM family member 7 | 1 | 160739057-160754821 |
| SLC12A1 | ENSG00000074803 | Solute carrier family 12 member 1 | 15 | 48178438-48304078 |
| SLC12A2 | ENSG00000064651 | Solute carrier family 12 member 2 | 5 | 128083766-128189677 |
| SLC12A3 | ENSG00000070915 | Solute carrier family 12 member 3 | 16 | 56865207-56915850 |
| SLC12A4 | ENSG00000124067 | Solute carrier family 12 member 4 | 16 | 67943474-67969601 |
| SLC12A5 | ENSG00000124140 | Solute carrier family 12 member 5 | 20 | 46021690-46060150 |
| SLC18A1 | ENSG00000036565 | Solute carrier family 18 member A1 | 8 | 20144855-20183206 |
| SLC18A2 | ENSG00000165646 | Solute carrier family 18 member A2 | 10 | 117241093-117279430 |
| SLC22A11 | ENSG00000168065 | Solute carrier family 22 member 11 | 11 | 64555690-64572875 |
| SLC22A12 | ENSG00000197891 | Solute carrier family 22 member 12 | 11 | 64590641-64602353 |
| SLC22A6 | ENSG00000197901 | Solute carrier family 22 member 6 | 11 | 62936385-62984983 |
| SLC22A8 | ENSG00000149452 | Solute carrier family 22 member 8 | 11 | 62989154-63015841 |
| SLC25A4 | ENSG00000151729 | Solute carrier family 25 member 4 | 4 | 185143266-185150382 |
| SLC25A5 | ENSG00000005022 | Solute carrier family 25 member 5 | X | 119468422-119471396 |
| SLC25A6 | ENSG00000169100 | Solute carrier family 25 member 6 | X | 1386152-1392113 |
| SLC2A2 | ENSG00000163581 | Solute carrier family 2 member 2 | 3 | 170996347-171026743 |
| SLC52A2 | ENSG00000185803 | Solute carrier family 52 member 2 | 8 | 144354135-144361272 |
| SLC5A2 | ENSG00000140675 | Solute carrier family 5 member 2 | 16 | 31483002-31490860 |
| SLC6A1 | ENSG00000157103 | Solute carrier family 6 member 1 | 3 | 10992186-11039247 |
| SLC6A2 | ENSG00000103546 | Solute carrier family 6 member 2 | 16 | 55655604-55706192 |
| SLC6A3 | ENSG00000142319 | Solute carrier family 6 member 3 | 5 | 1392794-1445440 |
| SLC6A4 | ENSG00000108576 | Solute carrier family 6 member 4 | 17 | 30194319-30236002 |
| SLC6A8 | ENSG00000130821 | Solute carrier family 6 member 8 | X | 153687926-153696588 |
| SLC7A11 | ENSG00000151012 | Solute carrier family 7 member 11 | 4 | 138164097-138242349 |
| SLC8A1 | ENSG00000183023 | Solute carrier family 8 member A1 | 2 | 40097270-40611053 |
| SLCO2B1 | ENSG00000137491 | Solute carrier organic anion transporter family | 11 | 75100563-75206549 |
| | | member 2B1 | | |
| SMO | ENSG00000128602 | Smoothened, frizzled class receptor | 7 | 129188633-129213545 |
| SMOX | ENSG00000088826 | Spermine oxidase | 20 | 4120980-4187747 |
| SMS | ENSG00000102172 | Spermine synthase | X | 21940709-21994837 |
| SNAP25 | ENSG00000132639 | Synaptosome associated protein 25 | 20 | 10218830-10307418 |
| SOAT1 | ENSG00000057252 | Sterol O-acyltransferase 1 | 1 | 179293714-179358680 |
| SQLE | ENSG00000104549 | Squalene epoxidase | 8 | 124998497-125022283 |
| SRC | ENSG00000197122 | SRC proto-oncogene, non-receptor tyrosine | 20 | 37344685-37406050 |
| | | kinase | | |
| SRD5A1 | ENSG00000145545 | Steroid 5 alpha-reductase 1 | 5 | 6633427-6674386 |
| SRD5A2 | ENSG00000277893 | Steroid 5 alpha-reductase 2 | 2 | 31522480-31580938 |
| SSTR1 | ENSG00000139874 | Somatostatin receptor 1 | 14 | 38207904-38213067 |
| SSTR2 | ENSG00000180616 | Somatostatin receptor 2 | 17 | 73165010-73176633 |
| SSTR5 | ENSG00000162009 | Somatostatin receptor 5 | 16 | 1078781-1080142 |
| STAT3 | ENSG00000168610 | Signal transducer and activator of transcription 3 | 17 | 42313324-42388568 |
| SV2A | ENSG00000159164 | Synaptic vesicle glycoprotein 2A | 1 | 149903318-149917844 |
| SYK | ENSG00000165025 | Spleen associated tyrosine kinase | 9 | 90801787-90898549 |
| SYT2 | ENSG00000143858 | Synaptotagmin 2 | 1 | 202590596-202710454 |
| TAAR1 | ENSG00000146399 | Trace amine associated receptor 1 | 6 | 132644898-132646051 |
| TACR1 | ENSG00000115353 | Tachykinin receptor 1 | 2 | 75046463-75199520 |
| TBK1 | ENSG00000183735 | TANK binding kinase 1 | 12 | 64452092-64502114 |
| TBXA2R | ENSG00000006638 | Thromboxane A2 receptor | 19 | 3594507-3606875 |
| TBXAS1 | ENSG00000059377 | Thromboxane A synthase 1 | 7 | 139777051-140020325 |
| TEK | ENSG00000120156 | TEK receptor tyrosine kinase | 9 | 27109141-27230174 |
| TERT | ENSG00000164362 | Telomerase reverse transcriptase | 5 | 1253147-1295068 |
| TFPI | ENSG00000003436 | Tissue factor pathway inhibitor | 2 | 187464230-187565760 |
| TGFB1 | ENSG00000105329 | Transforming growth factor beta 1 | 19 | 41301587-41353922 |
| TGFBR1 | ENSG00000106799 | Transforming growth factor beta receptor 1 | 9 | 99104038-99154192 |
| TH | ENSG00000180176 | Tyrosine hydroxylase | 11 | 2163929-2171815 |
| THRA | ENSG00000126351 | Thyroid hormone receptor alpha | 17 | 40058290-40093867 |
| THRB | ENSG00000151090 | Thyroid hormone receptor beta | 3 | 24117153-24495756 |
| TLR2 | ENSG00000137462 | Toll like receptor 2 | 4 | 153684070-153705702 |
| TLR5 | ENSG00000187554 | Toll like receptor 5 | 1 | 223109404-223143248 |
| TLR7 | ENSG00000196664 | Toll like receptor 7 | X | 12867072-12890361 |
| TLR8 | ENSG00000101916 | Toll like receptor 8 | X | 12906620-12923169 |
| TLR9 | ENSG00000239732 | Toll like receptor 9 | 3 | 52221080-52226163 |
| TNF | ENSG00000232810 | Tumor necrosis factor | 6 | 31575565-31578336 |
| TNFRSF8 | ENSG00000120949 | TNF receptor superfamily member 8 | 1 | 12063303-12144207 |
| TNFSF11 | ENSG00000120659 | TNF superfamily member 11 | 13 | 42562736-42608013 |
| TNFSF13B | ENSG00000102524 | TNF superfamily member 13b | 13 | 108251240-108308484 |
| TNKS | ENSG00000173273 | Tankyrase | 8 | 9555912-9782346 |
| TNNC1 | ENSG00000114854 | Troponin C1, slow skeletal and cardiac type | 3 | 52451100-52454041 |
| TOP1 | ENSG00000198900 | DNA topoisomerase I | 20 | 41028822-41124487 |
| TOP1MT | ENSG00000184428 | DNA topoisomerase I mitochondrial | 8 | 143304384-143359979 |
| TOP2A | ENSG00000131747 | DNA topoisomerase II alpha | 17 | 40388525-40417896 |
| TOP2B | ENSG00000077097 | DNA topoisomerase II beta | 3 | 25597905-25664907 |
| TPH1 | ENSG00000129167 | Tryptophan hydroxylase 1 | 11 | 18017564-18042426 |
| TPH2 | ENSG00000139287 | Tryptophan hydroxylase 2 | 12 | 71938845-72186618 |
| TPK1 | ENSG00000196511 | Thiamin pyrophosphokinase 1 | 7 | 144451941-144836395 |
| TPMT | ENSG00000137364 | Thiopurine S-methyltransferase | 6 | 18128311-18155077 |
| TPO | ENSG00000115705 | Thyroid peroxidase | 2 | 1374066-1543711 |
| TRHR | ENSG00000174417 | Thyrotropin releasing hormone receptor | 8 | 109086585-109121565 |
| TRPA1 | ENSG00000104321 | Transient receptor potential cation channel | 8 | 72019917-72075584 |
| | | subfamily A member 1 | | |
| TRPM8 | ENSG00000144481 | Transient receptor potential cation channel | 2 | 233917373-234019522 |
| | | subfamily M member 8 | | |
| TRPV1 | ENSG00000196689 | Transient receptor potential cation channel | 17 | 3565444-3609411 |
| | | subfamily V member 1 | | |
| TRPV3 | ENSG00000167723 | Transient receptor potential cation channel | 17 | 3510502-3557812 |
| | | subfamily V member 3 | | |
| TSHR | ENSG00000165409 | Thyroid stimulating hormone receptor | 14 | 80954989-81146302 |
| TSPO | ENSG00000100300 | Translocator protein | 22 | 43151547-43163242 |
| TUBA1A | ENSG00000167552 | Tubulin alpha 1a | 12 | 49184795-49189080 |
| TUBA4A | ENSG00000127824 | Tubulin alpha 4a | 2 | 219249710-219278170 |
| TUBB | ENSG00000196230 | Tubulin beta class I | 6 | 30720352-30725426 |
| TUBB1 | ENSG00000101162 | Tubulin beta 1 class VI | 20 | 59019429-59026654 |
| TUBB3 | ENSG00000258947 | Tubulin beta 3 class III | 16 | 89921392-89938761 |
| TUBB4B | ENSG00000188229 | Tubulin beta 4B class IVb | 9 | 137241287-137243707 |
| TUBD1 | ENSG00000108423 | Tubulin delta 1 | 17 | 59859479-59892945 |
| TUBE1 | ENSG00000074935 | Tubulin epsilon 1 | 6 | 112070663-112087529 |
| TUBG1 | ENSG00000131462 | Tubulin gamma 1 | 17 | 42609683-42615238 |
| TXN | ENSG00000136810 | Thioredoxin | 9 | 110243810-110256507 |
| TXNRD1 | ENSG00000198431 | Thioredoxin reductase 1 | 12 | 104215779-104350307 |
| TYK2 | ENSG00000105397 | Tyrosine kinase 2 | 19 | 10350529-10380572 |
| TYMS | ENSG00000176890 | Thymidylate synthetase | 18 | 657653-673578 |
| TYR | ENSG00000077498 | Tyrosinase | 11 | 89177875-89295759 |
| UGCG | ENSG00000148154 | UDP-glucose ceramide glucosyltransferase | 9 | 111896814-111935369 |
| VAMP1 | ENSG00000139190 | Vesicle associated membrane protein 1 | 12 | 6462237-6470987 |
| VAMP2 | ENSG00000220205 | Vesicle associated membrane protein 2 | 17 | 8159149-8163546 |
| VDR | ENSG00000111424 | Vitamin D receptor | 12 | 47841537-47943048 |
| VEGFA | ENSG00000112715 | Vascular endothelial growth factor A | 6 | 43770184-43786487 |
| VEGFB | ENSG00000173511 | Vascular endothelial growth factor B | 11 | 64234538-64238793 |
| VKORC1 | ENSG00000167397 | Vitamin K epoxide reductase complex subunit 1 | 16 | 31090842-31095980 |
| VKORC1L1 | ENSG00000196715 | Vitamin K epoxide reductase complex subunit 1 | 7 | 65873074-65959563 |
| | | like 1 | | |
| VWF | ENSG00000110799 | Von Willebrand factor | 12 | 5948874-6124770 |
| WEE1 | ENSG00000166483 | WEE1 G2 checkpoint kinase | 11 | 9573670-9593457 |
| XDH | ENSG00000158125 | Xanthine dehydrogenase | 2 | 31334321-31414742 |
| XIAP | ENSG00000101966 | X-linked inhibitor of apoptosis | X | 123859724-123913979 |
| XPO1 | ENSG00000082898 | Exportin 1 | 2 | 61477849-61538626 |
| YES1 | ENSG00000176105 | YES proto-oncogene 1, Src family tyrosine | 18 | 721588-812546 |
| | | kinase | | |

TABLE 5A
Gene targets of cancer therapeutic agents.

ABL1
ABL2
ACPP (ACP3)
ACVR1B
ADA
ADORA2A
ADORA3
AGXT
AKT1
AKT2
AKT3
ALK
AMER1 (FAM123B)
ANGPT1
ANGPT2
ANPEP
APC
APH1A
APH1B
AR
ARAF
ARFRP1
ARID1A
ARID1B
ARID2
ASXL1
ATM
ATR
ATRX
AURKA
AURKB
AURKC
AXIN1
AXL
B4GALNT1
BAP1
BARD1
BAX
BCL2
BCL2L1
BCL2L2
BCL6
BCORL1
BIRC5
BLK
BLM
BMX
BRAF
BRCA1
BRCA2
BRD2
BRD3
BRD4
BRIP1
BTG1
BTK
C11orf30 (EMSY)
CARD11
CAXX
CBFB
CBL
CCND1
CCND2
CCND3
CCNE1
CD19
CD274
CD38
CD79A
CD79B
CDC73
CDH1
CDK1
CDK12
CDK2
CDK4
CDK5
CDK6
CDK7
CDK8
CDK9
CDKN1A
CDKN1B
CDKN2A
CDKN2B
CDKN2C
CEBPA
CHD1
CHD2
CHD4
CHEK1
CHEK2
CIC
CPT1A
CRBN
CREBBP
CRKL
CRLF2
CRTC1
CRTC2
CSF1R
CSNK2A1
CSNK2A2
CTCF
CTNNA1
CTNNB1
CUL3
CXCR1
CXCR2
CXCR4
CYLD
CYP11B1
CYP11B2
CYP17A1
CYP19A1
DDR2
DHFR
DHH
DHX9
DICER
DNMT1
DNMT3A
DOTIL
DPP4
DRD2
DYRK1A
DYRK1B
DYRK2
DYRK3
DYRK4
EDNRA
EGFR
EHMT1
EHMT2
EIF4E
EP300
EPHA2
EPHA3
EPHA5
EPHA7
EPHB1
EPHB4
ERBB2
ERBB3
ERBB4
ERG
ERRF11
ESR1
ESR2
EZH2
F2R
FAM46C
FANCA
FANCC
FANCD2
FANCE
FANCF
FANCG
FANCL
FAS
FAT1
FBXW7
FCGR1A
FGF1
FGF10
FGF14
FGF19
FGF2
FGF23
FGF3
FGF4
FGF6
FGFR1
FGFR2
FGFR3
FGFR4
FGR
FH
FKBP1A
FLCN
FLT1
FLT3
FLT4
FNTA
FOLH1
FOLR1
FOLR2
FOLR3
FOXL2
FOXP1
FRK
FRS2
FUBP1
FYN
FZD8
GABRA6
GART
GATA1
GATA2
GATA3
GATA4
GATA6
GID4 (C17ORF39)
GLI1
GNA11
GNA13
GNAQ
GNAS
GNRH1
GNRHR
GPR124
GRIN2A
GRM3
GSK3A
GSK3B
H3F3A
HCK
HDAC1
HDAC10
HDAC11
HDAC2
HDAC3
HDAC4
HDAC5
HDAC6
HDAC7
HDAC8
HDAC9
HGF
HNF1A
HPRT1
HPSE
HRAS
HSD3B1
HSP90AA1
HSPA1A
HSPA1B
HSPB1
IDH1
IDH2
IDO1
IFNAR1
IFNAR2
IGF1R
IGF2
IHH
IKBKB
IKBKE
IKZF1
IL1B
IL2RA
IL2RB
IL2RG
IL6
IL6R
IL6ST
IL7R
INHA
INHBA
INHBB
INHBC
INHBE
INPP4B
IRF2
IRF4
IRS2
ITK
JAK1
JAK2
JAK3
JUN
KAT6A (MYST3)
KDM1A
KDM5A
KDM5C
KDM6A
KDR
KEAP1
KEL
KIF11
KIT
KLHL6
KMT2A (MLL)
KMT2C (MLL3)
KMT2D (MLL2)
KRAS
LAP3
LCK
LDLR
LHCGR
LIMK1
LMO1
LRP1B
LYN
LZTR1
MAGI2
MAP1A
MAP2
MAP2K1
MAP2K1 (MEK1)
MAP2K2
MAP2K2 (MEK2)
MAP2K4 (MEK4)
MAP3K1
MAP3K7
MAP3K8
MAPK1
MAPK11
MAPK14
MAPK3
MAPK8
MAPK9
MCL1
MDM2
MDM4
MED12
MEF2B
MEN1
MET
MGMT
MITF
MLH1
MPL
MRE11
MRE11A
MS4A1
MSH2
MSH6
MSLN
MST1R
MTOR
MUC5AC
MUTYH
MYC
MYCL (MYCL1)
MYCN
MYD88
NAE1
NAMPT
NBN
NCSTN
NEK11
NF1
NF2
NFE2L2
NFKBIA
NKX2-I
NOTCH1
NOTCH2
NOTCH3
NOTCH4
NPEPPS
NPM1
NR3C1
NRAS
NSD1
NTRK1
NTRK2
NTRK3
NUP93
PAK3
PALB2
PARK2
PARP1
PARP2
PARP3
PAX5
PBRM1
PDCD1LG2
PDE5A
PDGFRA
PDGFRB
PDK1
PGF
PIGF
PIK3C2B
PIK3CA
PIK3CB
PIK3CD
PIK3CG
PIK3R1
PIK3R2
PIM1
PIM2
PIM3
PLCG2
PLK1
PLK2
PLK3
PMS2
POLA1
POLD1
POLE
PORCN
PPARG
PPP2CA
PPP2R1A
PRDM1
PREX2
PRKAR1A
PRKCA
PRKCB
PRKCE
PRKCG
PRKCI
PRKDC
PRLR
PRMT5
PRSS8
PSEN1
PSENEN
PSMB1
PSMB10
PSMB2
PSMB5
PSMB8
PSMB9
PSMD1
PSMD2
PTCH1
PTEN
PTGS2
PTK2
PTK6
PTPN11
QKI
RAC1
RAD50
RAD51
RAD51B
RAD51C
RAD51D
RAD54L
RAF1
RANBP2
RARA
RARB
RARG
RB1
RBM10
RBM39
RET
RICTOR
RNF43
ROCK1
ROCK2
ROS1
RPL3
RPS6KB1
RPTOR
RRM1
RUNX1
RUNX1T1
RXRA
RXRB
RXRG
S1PR1
SDHA
SDHB
SDHC
SDHD
SETD2
SF3B1
SH2B3
SHH
SIK1
SIRT1
SLAMF7
SLC2A2
SLIT2
SMAD2
SMAD3
SMAD4
SMARCA4
SMARCB1
SMO
SNCAIP
SOCS1
SOX10
SOX2
SOX9
SPEN
SPOP
SPTA1
SRC
SSTR2
SSTR5
STAG2
STAT3
STAT4
STK11
SUFU
SYK
TAF1
TBK1
TBX3
TEK
TERC
TERT
TET2
TGFB1
TGFBR1
TGFBR2
TLR5
TLR7
TLR8
TMB
TNF
TNFAIP3
TNFRSF14
TNFRSF8
TNFSF11
TNFSF13B
TNKS
TOP1
TOP1MT
TOP2A
TOP2B
TP53
TSC1
TSC2
TSHR
TUBA1A
TUBA4A
TUBB
TUBB1
TUBB3
TUBD1
TUBE1
TUBG1
TXN
TYK2
TYMS
U2AF1
VDR
VEGFA
VEGFB
VHL
WEE1
WISP3
WT1
XIAP
XPO1
YES1
ZBTB2
ZNF217
ZNF703

TABLE 5B
Gene targets of cancer therapeutic agents.

ABL1
ABL2
ACPP (ACP3)
ADA
ADORA2A
ADORA3
AGXT
AKT1
AKT2
AKT3
ALK
ANGPT1
ANGPT2
ANPEP
APH1A
APH1B
AR
ARAF
ATR
AURKA
AURKB
AURKC
AXL
B4GALNT1
BAX
BCL2
BCL2L1
BCL2L2
BIRC5
BLK
BMX
BRAF
BRD2
BRD3
BRD4
BTK
CCND1
CCND2
CCND3
CD19
CD274
CD38
CDK1
CDK2
CDK4
CDK5
CDK6
CDK7
CDK9
CHD1
CHEK1
CHEK2
CPT1A
CRBN
CRTC1
CRTC2
CSF1R
CSNK2A1
CSNK2A2
CXCR1
CXCR2
CXCR4
CYP17A1
CYP19A1
DDR2
DHFR
DHH
DHX9
DNMT1
DOT1L
DPP4
DRD2
EDNRA
EGFR
EHMT1
EHMT2
EPHA2
EPHB4
ERBB2
ERBB3
ERBB4
ESR1
ESR2
EZH2
F2R
FCGR1A
FGF1
FGF2
FGFR1
FGFR2
FGFR3
FGFR4
FGR
FKBP1A
FLT1
FLT3
FLT4
FNTA
FOLH1
FOLR1
FOLR2
FOLR3
FRK
FYN
FZD8
GART
GNRH1
GNRHR
GSK3A
GSK3B
HCK
HDAC1
HDAC10
HDAC11
HDAC2
HDAC3
HDAC4
HDAC5
HDAC6
HDAC7
HDAC8
HDAC9
HPRT1
HPSE
HSP90AA1
HSPA1A
HSPA1B
HSPB1
IDH1
IDH2
IDO1
IFNAR1
IFNAR2
IGF1R
IHH
IKBKB
IL1B
IL2RA
IL2RB
IL2RG
IL6
IL6R
INHA
INHBA
INHBB
INHBC
INHBE
ITK
JAK1
JAK2
JAK3
KDM1A
KDR
KIF11
KIT
KRAS
LAP3
LCK
LDLR
LHCGR
LIMK1
LYN
MAP1A
MAP2
MAP2K1
MAP2K2
MAP3K7
MAP3K8
MAPK1
MAPK11
MAPK14
MAPK3
MAPK8
MAPK9
MCL1
MDM2
MET
MGMT
MRE11
MS4A1
MSLN
MST1R
MTOR
MUC5AC
NAE1
NAMPT
NCSTN
NEK11
NOTCH1
NOTCH2
NOTCH3
NOTCH4
NPEPPS
NR3C1
NRAS
NTRK1
NTRK2
NTRK3
PARP1
PARP2
PARP3
PDE5A
PDGFRA
PDGFRB
PGF
PIGF
PIK3CA
PIK3CB
PIK3CD
PIK3CG
PIM3
PLK1
PLK2
PLK3
POLA1
PORCN
PPARG
PPP2CA
PRKCA
PRKCB
PRKCE
PRKCG
PRKCI
PRKDC
PRLR
PSEN1
PSENEN
PSMB1
PSMB10
PSMB2
PSMB5
PSMB8
PSMB9
PSMD1
PSMD2
PTCH1
PTGS2
PTK2
PTK6
RAC1
RAD50
RAF1
RARA
RARB
RARG
RET
RICTOR
ROCK1
ROCK2
ROS1
RPL3
RPS6KB1
RPTOR
RRM1
RXRA
RXRB
RXRG
S1PR1
SH2B3
SHH
SIK1
SIRT1
SLAMF7
SLC2A2
SMO
SRC
SSTR2
SSTR5
STAT3
SYK
TBK1
TEK
TERT
TGFB1
TGFBR1
TLR5
TLR7
TLR8
TNF
TNFRSF8
TNFSF11
TNFSF13B
TNKS
TOP1
TOP1MT
TOP2A
TOP2B
TUBA1A
TUBA4A
TUBB
TUBB1
TUBB3
TUBD1
TUBE1
TUBG1
TXN
TYK2
TYMS
VDR
VEGFA
VEGFB
WEE1
XIAP
XPO1
YES1

TABLE 5C
Gene targets of cancer therapeutic agents.

ABL1
ABL2
ACPP (ACP3)
ADA
ADORA2A
ADORA3
AGXT
AKT1
AKT2
AKT3
ALK
ANGPT1
ANGPT2
ANPEP
APH1A
APH1B
AR
ARAF
ATR
AURKA
AURKB
AURKC
AXL
B4GALNT1
BAX
BCL2
BCL2L1
BCL2L2
BIRC5
BLK
BMX
BRAF
BRD2
BRD3
BRD4
BTK
CCND1
CCND2
CCND3
CD19
CD274
CD38
CDK1
CDK2
CDK4
CDK5
CDK6
CDK7
CDK9
CHD1
CHEK1
CHEK2
CPT1A
CRBN
CRTC1
CRTC2
CSF1R
CSNK2A1
CSNK2A2
CXCR1
CXCR2
CXCR4
CYP17A1
CYP19A1
DDR2
DHFR
DHH
DHX9
DNMT1
DOT1L
DPP4
DRD2
DYRK1A
DYRK1B
DYRK2
DYRK3
DYRK4
EDNRA
EGFR
EHMT1
EHMT2
EIF4E
EPHA2
EPHB4
ERBB2
ERBB3
ERBB4
ESR1
ESR2
EZH2
F2R
FCGR1A
FGF1
FGF2
FGFR1
FGFR2
FGFR3
FGFR4
FGR
FKBP1A
FLT1
FLT3
FLT4
FNTA
FOLH1
FOLR1
FOLR2
FOLR3
FRK
FYN
FZD8
GART
GNRH1
GNRHR
GSK3A
GSK3B
HCK
HDAC1
HDAC10
HDAC11
HDAC2
HDAC3
HDAC4
HDAC5
HDAC6
HDAC7
HDAC8
HDAC9
HPRT1
HPSE
HSP90AA1
HSPA1A
HSPA1B
HSPB1
IDH1
IDH2
IDO1
IFNAR1
IFNAR2
IGF1R
IHH
IKBKB
IL1B
IL2RA
IL2RB
IL2RG
IL6
IL6R
IL6ST
INHA
INHBA
INHBB
INHBC
INHBE
ITK
JAK1
JAK2
JAK3
KDM1A
KDR
KIF11
KIT
KRAS
LAP3
LCK
LDLR
LHCGR
LIMK1
LYN
MAP1A
MAP2
MAP2K1
MAP2K2
MAP3K7
MAP3K8
MAPK1
MAPK11
MAPK14
MAPK3
MAPK8
MAPK9
MCL1
MDM2
MET
MGMT
MS4A1
MSLN
MST1R
MTOR
MUC5AC
NAE1
NAMPT
NBN
NCSTN
NEK11
NOTCH1
NOTCH2
NOTCH3
NOTCH4
NPEPPS
NR3C1
NRAS
NTRK1
NTRK2
NTRK3
PARP1
PARP2
PARP3
PDE5A
PDGFRA
PDGFRB
PGF
PIGF
PIK3CA
PIK3CB
PIK3CD
PIK3CG
PIM1
PIM2
PIM3
PLK1
PLK2
PLK3
POLA1
PORCN
PPARG
PPP2CA
PRKCA
PRKCB
PRKCE
PRKCG
PRKCI
PRKDC
PRLR
PRMT5
PSEN1
PSENEN
PSMB1
PSMB10
PSMB2
PSMB5
PSMB8
PSMB9
PSMD1
PSMD2
PTCH1
PTGS2
PTK2
PTK6
RAC1
RAD50
RAF1
RARA
RARB
RARG
RBM39
RET
RICTOR
ROCK1
ROCK2
ROS1
RPL3
RPS6KB1
RPTOR
RRM1
RXRA
RXRB
RXRG
S1PR1
SH2B3
SHH
SIK1
SIRT1
SLAMF7
SLC2A2
SMO
SRC
SSTR2
SSTR5
STAT3
SYK
TBK1
TEK
TERT
TGFB1
TGFBR1
TLR5
TLR7
TLR8
TNF
TNFRSF8
TNFSF11
TNFSF13B
TNKS
TOP1
TOP1MT
TOP2A
TOP2B
TUBA1A
TUBA4A
TUBB
TUBB1
TUBB3
TUBD1
TUBE1
TUBG1
TXN
TYK2
TYMS
VDR
VEGFA
VEGFB
WEE1
XIAP
XPO1
YES1

TABLE 5D
Gene targets of cancer therapeutic agents.

BIRC5
BRAF
CDK4
CDK6
CYP11B1
CYP11B2
EGFR
FLT3
GART
JAK1
JAK2
KIF11
KIT
MAP2K1
MAP2K2
MDM2
MET
MTOR
PIK3CA
PSMB5
RPL3
TOP2A
TUBG1

[0284] Tables 6A-6C provide lists of gene modulatory reagents, one or more of which may be used in a method of cell editing described herein.

TABLE 6A
Library of gene modulatory reagents.

| Target | | SEQ | | |
|---|---|---|---|---|
| Gene | | ID | | |
| Symbol | Transcript | NO. | Sequences | gRNA coordinates |
| ABL1 | ENST00000372348.6 | 1 | GGACACAGGCCCATGGTACC | chr9:130854923-130854946_− |
| | | 2 | ATCATTCAACGGTGGCCGAC | chr9:130862814-130862837_+ |
| | | 3 | CATCACGCCAGTCAACAGTC | chr9:130854891-130854914_+ |
| | | 4 | ATCTCAGCGAGATGGACCTC | chr9:130855023-130855046_− |
| | | 5 | AAGAAGGAATCATCGAGGCA | chr9:130714400-130714423_+ |
| ABL2 | ENST00000502732.5 | 6 | CCTCAGCCCCGCGGGATCCG; | chr1:179229326-179229349_− |
| | | 7 | TTACCATGAAGCACAAACTT | chr1:179121669-179121692_− |
| | | 8 | GGTGAAAAGCTACGAGTCCT | chr1:179126650-179126673_− |
| | | 9 | GGAGTACGCGAGAGCAGGGA | chr1:179229393-179229416_− |
| | | 10 | GAGTACGCGAGAGCAGGGAT | chr1:179229392-179229415_− |
| ACPP | ENST00000336375.9 | 11 | GCAGCCCTGTTTCCCCCAGA | chr3:132332248-132332271_+ |
| (ACP3) | | 12 | CCTACTCTGGCAGCCCATCC | chr3:132332292-132332315_+ |
| | | 13 | GAAAGAGGAACTGTGTGCAC | chr3:132332311-132332334_− |
| | | 14 | AGTCACAAACTTCAACTCCT | chr3:132317550-132317573_− |
| | | 15 | CCAGATGCTGACACCTTCTG | chr3:132332261-132332284_− |
| ADA | ENST00000372874.8 | 16 | GAGACTTCGGGGTCAAGGCC | chr20:44625599-44625622_− |
| | | 17 | CAGGCTTGATGGATCCGTCT | chr20:44636248-44636271_+ |
| | | 18 | AAACCATCTTATACTATGGC | chr20:44636225-44636248_− |
| | | 19 | CCAAAGTGGAGCCAATCCCC | chr20:44626466-44626489_− |
| | | 20 | CTCCCAGCTAACACAGCAGA | chr20:44629130-44629153_− |
| ADORA2A | ENST00000611543.4 | 21 | GAACGTCACCAACTACTTTG | chr22:24433517-24433540_+ |
| | | 22 | TTGCCATCCGCATCCCGCTC | chr22:24433714-24433737_+ |
| | | 23 | CATGGCCACAGACGACAGGC | chr22:24433384-24433407_− |
| | | 24 | TGGGCATGGCCACAGACGAC | chr22:24433388-24433411_− |
| | | 25 | AGCACACCAGCACATTGCCC | chr22:24433466-24433489_− |
| ADORA3 | ENST00000241356.4 | 26 | TGGGCATCTTGCCTTCCCAG | chr1:111503347-111503370_+ |
| | | 27 | GACAGAGCAGTGCTGTTGTT | chr1:111503328-111503351_+ |
| | | 28 | AATAGAAGGTGGTGGTCTGC | chr1:111503206-111503229_+ |
| | | 29 | CAAGGACATGATGGAGGCGT | chr1:111503051-111503074_+ |
| | | 30 | GTCCTTGCTGGCCATCGCTG | chr1:111503035-111503058_− |
| AGXT | ENST00000307503.3 | 31 | GGACCCCCCTTTACATGGAC | chr2:240873022-240873045_+ |
| | | 32 | CAACCTGCCTCCTCGCATCA | chr2:240868957-240868980_+ |
| | | 33 | CCCCCGGCTGCCATGATGCG | chr2:240868967-240868990_− |
| | | 34 | TCCAGTACGTGTTCCAGACC | chr2:240869194-240869217_+ |
| | | 35 | CATTTGGGGGCAGCGAGCCG | chr2:240869321-240869344_+ |
| AKT1 | ENST00000349310.7 | 36 | TGGCACCTTCATTGGCTACA | chr14:104780144-104780167_− |
| | | 37 | GGCTCACCCAGTGACAACTC | chr14:104775697-104775720_− |
| | | 38 | GCCGTCAGCCACAGTCTGGA | chr14:104775759-104775782_+ |
| | | 39 | CGACGTGGCTATTGTGAAGG | chr14:104792615-104792638_− |
| | | 40 | GGAGGAGATGGACTTCCGGT | chr14:104775719-104775742_− |
| AKT2 | ENST00000392038.6 | 41 | ATGACAAAGGTGTTGGGTCG | chr19:40255220-40255243_+ |
| | | 42 | CTGGTGCGGGAGAAGGCCAC | chr19:40241986-40242009_− |
| | | 43 | CAGGAAGTACCGTGGCCTCC | chr19:40257016-40257039_+ |
| | | 44 | GTCCATGGGGTCCTCGCCTG | chr19:40242611-40242634_+ |
| | | 45 | TGTCTGTCATCAAAGAAGGC | chr19:40265234-40265257_− |
| AKT3 | ENST00000366539.5 | 46 | TTTGACTATTTGAAACTACT | chr1:243637707-243637730_− |
| | | 47 | TTACCATTGTGAAAGAAGGT | chr1:243843137-243843160_− |
| | | 48 | GATGTTACCATTGTGAAAGA | chr1:243843141-243843164_− |
| | | 49 | TCTCTATAACAGTAGTCCAC | chr1:243664802-243664825_+ |
| | | 50 | TCCCCTCAACAACTTTTCAG | chr1:243695593-243695616_− |
| ALK | ENST00000389048.7 | 51 | GACCTGCCATTGAGGAGTGT | chr2:29320787-29320810_+ |
| | | 52 | CCCCTCCACTGCATGACCTC | chr2:29694949-29694972_− |
| | | 53 | GTCCAGAGCTAGCGAGCCGC | chr2:29920377-29920400_+ |
| | | 54 | TCAGCGAGCTGTTCAGTTGG | chr2:29920128-29920151_− |
| | | 55 | ATTCCAGGGCCACTCGAAAT | chr2:29383797-29383820_+ |
| ANGPT1 | ENST00000517746.5 | 56 | CTGCCATTCTGACTCACATA | chr8:107497504-107497527_− |
| | | 57 | ACAGTGGGAGAAGATATAAC | chr8:107497453-107497476_− |
| | | 58 | TCGTCAAACATATATAATCC | chr8:107322009-107322032_− |
| | | 59 | GAGAAATCCGGTTCCACGTG | chr8:107497322-107497345_+ |
| | | 60 | GCACCCTATGTGAGTCAGAA | chr8:107497501-107497524_+ |
| ANGPT2 | ENST00000325203.9 | 61 | GGCAGTTGTCCATCTCTGGC | chr8:6562774-6562797_+ |
| | | 62 | CGGAAGAGCATGGACAGCAT | chr8:6562845-6562868_− |
| | | 63 | AGCAATATCAGGTCCAGCAT | chr8:6562817-6562840_− |
| | | 64 | AAGCAATATCAGGTCCAGCA | chr8:6562818-6562841_− |
| | | 65 | CAGGAGGAAAGTGTAGCTGC | chr8:6562793-6562816_+ |
| ANPEP | ENST00000300060.6 | 66 | CCACGCTTTACTTTGGTCCA | chr15:89806370-89806393_+ |
| | | 67 | CCCGCTGTCCACACCCGCCT | chr15:89803702-89803725_− |
| | | 68 | CGCCGGCGTTGAAGTCTGGC | chr15:89804374-89804397_+ |
| | | 69 | TTGAACTCGGCCTTCATGGC | chr15:89805376-89805399_+ |
| | | 70 | CTCAGTCTTGTCAATGTCGG | chr15:89806121-89806144_+ |
| APH1A | ENST00000369109.7 | 71 | GCCATCTGGCGGATGGAGAT | chr1:150267720-150267743_+ |
| | | 72 | TGACCGACCGGTCAGATGCC | chr1:150268042-150268065_− |
| | | 73 | TCTTGGTCCATGTGACCGAC | chr1:150268054-150268077_− |
| | | 74 | ACCCATCTCCATCCGCCAGA | chr1:150267721-150267744_− |
| | | 75 | TTAGCATCGCTGAGTGAGGA | chr1:150267750-150267773_− |
| APH1B | ENST00000261879.9 | 76 | ATCAGCAGATATTTCTGTGT | chr15:63279242-63279265_− |
| | | 77 | CTCTTGCCATGAACCAAACA | chr15:63279196-63279219_− |
| | | 78 | TCTTGCCATGAACCAAACAA | chr15:63279195-63279218_− |
| | | 79 | TAGGCCAGCAGTCGCATAGA | chr15:63286603-63286626_− |
| | | 80 | ATAGGCCAGCAGTCGCATAG | chr15:63286604-63286627_− |
| AR | ENST00000374690.8 | 81 | TAGAGGCCCCACAGGCTACC | chrX:67545448-67545471_+ |
| | | 82 | GCAGCTGAGTCATCCTCGTC | chrX:67545602-67545625_− |
| | | 83 | GCCCATCGTAGAGGCCCCAC | chrX:67545440-67545463_+ |
| | | 84 | CAGCAGGGACAACGTGGATG | chrX:67545624-67545647_− |
| | | 85 | TCCAGGACCAGGTAGCCTGT | chrX:67545455-67545478_− |
| ARAF | ENST00000377045.8 | 86 | TGGAGCGGATGCGCTGTAGG | chrX:47566695-47566718_− |
| | | 87 | ACAAAATTGTGCATGGTCAG | chrX:47564878-47564901_− |
| | | 88 | ACAGACTGTGGGGACCTTGG | chrX:47565090-47565113_− |
| | | 89 | GTGGAGCGGATGCGCTGTAG | chrX:47566696-47566719_− |
| | | 90 | GTGGTCTACCGACTCATCAA | chrX:47563306-47563329_+ |
| ATR | ENST00000350721.8 | 91 | CAAGAAGAATATTCCTTGAG | chr3:142556507-142556530_− |
| | | 92 | CGCACGTCAGCATTCTGGCA | chr3:142550228-142550251_+ |
| | | 93 | CAACTTGTCTGTACTCTTCA | chr3:142556058-142556081_− |
| | | 94 | TCCAGAGACAGATGCTGACT | chr3:142553316-142553339_+ |
| | | 95 | ACATGTCCGTGTTCAGAGAA | chr3:142556004-142556027_+ |
| AURKA | ENST00000395913.7 | 96 | GTGCTTGCAAAGGAATGCGC | chr20:56386391-56386414_+ |
| | | 97 | ATTACCTGTAAATAGTGGCC | chr20:56386445-56386468_− |
| | | 98 | ATGCGCTGGGAAGAATTTGA | chr20:56386405-56386428_+ |
| | | 99 | TGCTTGCAAAGGAATGCGCT | chr20:56386392-56386415_+ |
| | | 100 | TGAGTCACGAGAACACGTTT | chr20:56386489-56386512_+ |
| AURKB | ENST00000585124.5 | 101 | TCCCCCTTTCTCTCTAAGGA | chr17:8210220-8210243_− |
| | | 102 | AACTCCTACCCCTGGCCCTA | chr17:8210186-8210209_− |
| | | 103 | GGGCCATCCTTAGAGAGAAA | chr17:8210217-8210240_+ |
| | | 104 | CTCCATCACCTTCTGGCCAG | chr17:8207599-8207622_+ |
| | | 105 | GGACATTGGAGCGGCTCATG | chr17:8207746-8207769_+ |
| AURKC | ENST00000302804.11 | 106 | AATCGGGCGTCCCCTGGGCA | chr19:57232059-57232082_+ |
| | | 107 | ATCGGGCGTCCCCTGGGCAA | chr19:57232060-57232083_+ |
| | | 108 | TTTGAAATCGGGCGTCCCCT | chr19:57232054-57232077_+ |
| | | 109 | CAGTCGATGACTTTGAAATC | chr19:57232043-57232066_+ |
| | | 110 | CCAAATTTCCCCTTGCCCAG | chr19:57232069-57232092_− |
| AXL | ENST00000301178.8 | 111 | GAGTAGGTCCACGGGCTCTG | chr19:41221963-41221986_− |
| | | 112 | TGCCACACACACTGTCAGAT | chr19:41239227-41239250_− |
| | | 113 | GCCTAGCCGAAGCTGATGGG | chr19:41238028-41238051_− |
| | | 114 | CCACCTCCAGCTCCGTGGGT | chr19:41231222-41231245_− |
| | | 115 | AGTAGGTCCACGGGCTCTGG | chr19:41221962-41221985_− |
| B4GALNT1 | ENST00000341156.8 | 116 | CCAGTACCCCCTACAGGGTG | chr12:57631012-57631035_− |
| | | 117 | CCCACGGCGCAAGAGGTAGC | chr12:57632011-57632034_+ |
| | | 118 | GCAGTTGTGAGTCCAGTGGG | chr12:57631321-57631344_− |
| | | 119 | TGGCAGGGGCTATGAGCAGC | chr12:57631045-57631068_+ |
| | | 120 | GGGGGCGCCCACGGCGCAAG | chr12:57632004-57632027_+ |
| BAX | ENST00000345358.11 | 121 | ATGATCTGCTCAGAGCTGGT | chr19:48955549-48955572_− |
| | | 122 | GCAGCTGACATGTTTTCTGA | chr19:48956249-48956272_+ |
| | | 123 | GTTTCATCCAGGATCGAGCA | chr19:48955685-48955708_+ |
| | | 124 | TCTGACGGCAACTTCAACTG | chr19:48956264-48956287_+ |
| | | 125 | GGCGGTGATGGACGGGTCCG | chr19:48954921-48954944_+ |
| BCL2 | ENST00000398117.1 | 126 | CCATTATAAGCTGTCGCAGA | chr18:63318587-63318610_− |
| | | 127 | TCCAGCCGCATCCCGGGACC | chr18:63318470-63318493_− |
| | | 128 | CGCGCGGGGACGCTTTGCCA | chr18:63318269-63318292_− |
| | | 129 | GCGGCGAGGTCCTGGCGACC | chr18:63318452-63318475_+ |
| | | 130 | CACACCTGGATCCAGGATAA | chr18:63318088-63318111_− |
| BCL2L1 | ENST00000307677.4 | 131 | TCCCAGCTCCACATCACCCC | chr20:31721868-31721891_− |
| | | 132 | AGCAGTAAAGCAAGCGCTGA | chr20:31721944-31721967_− |
| | | 133 | TGGCAACCCATCCTGGCACC | chr20:31722040-31722063_− |
| | | 134 | TCCTACAAGCTTTCCCAGAA | chr20:31722156-31722179_− |
| | | 135 | CAGCAGCAGTTTGGATGCCC | chr20:31721983-31722006_− |
| BCL2L2 | ENST00000250405.9 | 136 | CTGAGCCGCCAGATCAGAGA | chr14:23307945-23307968_− |
| | | 137 | GACCTGGGTGAAGCGTTGTT | chr14:23307990-23308013_− |
| | | 138 | AGGCAGAAGGGTTATGTCTG | chr14:23307833-23307856_+ |
| | | 139 | GGTTATAAGCTGAGGCAGAA | chr14:23307821-23307844_+ |
| | | 140 | GCGTTGTTGGGCTGAGCCTG | chr14:23307978-23308001_− |
| BIRC5 | ENST00000350051.7 | 141 | CCAGGCAGGGGGCAACGTCG | chr17:78214323-78214346_− |
| | | 142 | ATGCGGTGGTCCTTGAGAAA | chr17:78214349-78214372_− |
| | | 143 | GCTGCGCCTGCACCCCGGAG | chr17:78214404-78214427_+ |
| | | 144 | GAACATAAAAAGCATTCGTC | chr17:78216667-78216690_+ |
| | | 145 | CAGGCGCAGCCCTCCAAGAA | chr17:78214391-78214414_− |
| BLK | ENST00000259089.8 | 146 | CTGGCCAGGTCACTCGTCAC | chr8:11549039-11549062_+ |
| | | 147 | GAGAAGCTACAGGTCCTGAA | chr8:11548102-11548125_+ |
| | | 148 | CTTTAGATCACAGGGTCGGA | chr8:11550164-11550187_+ |
| | | 149 | AGGTGGTTCTTTAGATCACA | chr8:11550156-11550179_+ |
| | | 150 | GAAGGTCAGCGCCCAAGACA | chr8:11543301-11543324_+ |
| BMX | ENST00000357607.6 | 151 | TGTCATATTCATAGTAGGAA | chrX:15508463-15508486_− |
| | | 152 | ACTGCATGTTGAAGTTTGGC | chrX:15522512-15522535_− |
| | | 153 | TGGTACTTGAAGATGGTGGC | chrX:15522446-15522469_− |
| | | 154 | GGTACTTGAAGATGGTGGCT | chrX:15522445-15522468_− |
| | | 155 | TGGTACTTGACCAGCAGGTG | chrX:15516125-15516148_− |
| BRAF | ENST00000646891.1 | 156 | AGAGAAGAAACCAATTGGTT | chr7:140808039-140808062_− |
| | | 157 | GAGAGAAGAAACCAATTGGT | chr7:140808040-140808063_− |
| | | 158 | CAACAGTTATTGGAATCTCT | chr7:140834801-140834824_− |
| | | 159 | GTGCTTTCTTTAGACTGTCT | chr7:140808946-140808969_+ |
| | | 160 | TGGGTGGTGTTCAAAGAACT | chr7:140800444-140800467_+ |
| BRD2 | ENST00000374825.8 | 161 | GCAGGCACCGAAGCCATTGT | chr6:32974567-32974590_− |
| | | 162 | TGGACATGGGTACTATTAAG | chr6:32975411-32975434_+ |
| | | 163 | AAGAGACGGCAGGCACCTGA | chr6:32976274-32976297_− |
| | | 164 | GGGCACTGGTAACACTGCCC | chr6:32976253-32976276_− |
| | | 165 | GTGTCCAATCCCAAAAAGCC | chr6:32974627-32974650_+ |
| BRD3 | ENST00000303407.11 | 166 | TCGTGGCGGTGGACATCCTC | chr9:134053461-134053484_+ |
| | | 167 | ATTTGATTGCGTCCACGGGC | chr9:134053275-134053298_+ |
| | | 168 | ACCTTTGCCCTTTGGAGCAG | chr9:134051592-134051615_+ |
| | | 169 | GAGTGCAAGCGAATGTATGC | chr9:134052346-134052369_− |
| | | 170 | CGCCACGACAGTCGCCCCCG | chr9:134053446-134053469_− |
| BRD4 | ENST00000263377.6 | 171 | GGGTGGCCGCGATGATGGGT | chr19:15265367-15265390_+ |
| | | 172 | TCTTTGGAGGTTTCACAGGC | chr19:15264618-15264641_+ |
| | | 173 | GAGCAGGTATTGCAGTTGGT | chr19:15272898-15272921_+ |
| | | 174 | TTCAGCTTGACGGCATCCAC | chr19:15272821-15272844_+ |
| | | 175 | TGGCTCGTGAATGGGGTCAA | chr19:15264697-15264720_+ |
| BTK | ENST00000308731.7 | 176 | CTTCCTTAGTTCTTCAGTTG | chrX:101370022-101370045_+ |
| | | 177 | TCTCCCCAACTGAAGAACTA | chrX:101370025-101370048_− |
| | | 178 | GAACCAGATCACTGTTGTAC | chrX:101362662-101362685_+ |
| | | 179 | GCCCTTCATCATATACAACC | chrX:101370060-101370083_+ |
| | | 180 | AATCCGGTACAACAGTGATC | chrX:101362665-101362688_− |
| CCND1 | ENST00000227507.2 | 181 | TGGTTTCCACTTCGCAGCAC | chr11:69641327-69641350_− |
| | | 182 | ATGCCAACCTCCTCAACGAC | chr11:69641368-69641391_+ |
| | | 183 | GCACAGGAGCTGGTGTTCCA | chr11:69641311-69641334_− |
| | | 184 | GCGACGATCTTCCGCATGGA | chr11:69641472-69641495_− |
| | | 185 | GGTTGGCATCGGGGTACGCG | chr11:69641354-69641377_− |
| CCND2 | ENST00000261254.7 | 186 | TGCAGATGGGACTTCGGAGT | chr12:4276082-4276105_− |
| | | 187 | CTCGTGGCACAGCAGCTCCA | chr12:4274038-4274061_− |
| | | 188 | CCAGGTAATTCATGGCCAGA | chr12:4276039-4276062_− |
| | | 189 | CAGCTCCATGGCCAGCCCGG | chr12:4274026-4274049_− |
| | | 190 | GCAGAACCTGCTCACCATCG | chr12:4274120-4274143_+ |
| CCND3 | ENST00000372991.8 | 191 | TACTCGGGCAGCGAACAGGC | chr6:41941648-41941671_+ |
| | | 192 | GGGGTACGTAGCGCTCCTCC | chr6:41941528-41941551_+ |
| | | 193 | AACACAGCAGCTCCATACTC | chr6:41941633-41941656_+ |
| | | 194 | GTCTTGCGTCCCCACCCGAA | chr6:41940494-41940517_− |
| | | 195 | ATGGAGCTGCTGTGTTGCGA | chr6:41941626-41941649_− |
| CD19 | ENST00000324662.7 | 196 | ATTACCCACATATCTCTGGC | chr16:28933376-28933399_− |
| | | 197 | CTGGACCCATGTGCACCCCA | chr16:28933312-28933335_+ |
| | | 198 | GTGACGCCTCCCCCAGGAAG | chr16:28936521-28936544_+ |
| | | 199 | AGAGCTGAAGGACGATCGCC | chr16:28933357-28933380_+ |
| | | 200 | CGGGCCACAGCTCAAGACGC | chr16:28933421-28933444_+ |
| CD274 | ENST00000381577.3 | 201 | TCTGAAGTGCAGCATTTCCC | chr9:5457304-5457327_− |
| | | 202 | TTGAAGGACCAGCTCTCCCT | chr9:5457287-5457310_+ |
| | | 203 | TACCGCTGCATGATCAGCTA | chr9:5457359-5457382_+ |
| | | 204 | TGAACATGAACTGACATGTC | chr9:5462885-5462908_+ |
| | | 205 | TGAACTGACATGTCAGGCTG | chr9:5462891-5462914_+ |
| CD38 | ENST00000226279.7 | 206 | TATCAGCCACTAATGAAGTT | chr4:15816592-15816615_+ |
| | | 207 | TGAAAGCATCCCATACACTT | chr4:15816522-15816545_− |
| | | 208 | CCGGGGACAAACCCTGCTGC | chr4:15778442-15778465_+ |
| | | 209 | CTCCTAGAGAGCCGGCAGCA | chr4:15778453-15778476_− |
| | | 210 | CTGGACCTGTGTGAACTGAT | chr4:15824911-15824934_− |
| CDK1 | ENST00000395284.7 | 211 | CCATAGTTAGTCAATGGGTA | chr10:60780146-60780169_− |
| | | 212 | AAGGGTAGACACAAAACTAC | chr10:60784724-60784747_+ |
| | | 213 | ACACAAAACTACAGGTCAAG | chr10:60784732-60784755_+ |
| | | 214 | TATCCCTCCTGGTCAGTACA | chr10:60785747-60785770_+ |
| | | 215 | AGATCTCCAGAAGTATTGCT | chr10:60791907-60791930_+ |
| CDK2 | ENST00000266970.8 | 216 | CCTTAAGCAGAGAGATCTCT | chr12:55967886-55967909_− |
| | | 217 | AAGCAGAGAGATCTCTCGGA | chr12:55967882-55967905_− |
| | | 218 | TGGAATAATATTTGCAGCCC | chr12:55969509-55969532_− |
| | | 219 | CGAGCTCCTGAAATCCTCCT | chr12:55969492-55969515_+ |
| | | 220 | AATAATATTTGCAGCCCAGG | chr12:55969506-55969529_− |
| CDK4 | ENST00000257904.10 | 221 | CTTGCCAGCCGAAACGATCA | chr12:57751205-57751228_− |
| | | 222 | ACCTCACGAACTGTGCTGAT | chr12:57751547-57751570_+ |
| | | 223 | TGCCTATGGGACAGTGTACA | chr12:57751650-57751673_− |
| | | 224 | CACGAACTGTGCTGATGGGA | chr12:57751551-57751574_+ |
| | | 225 | AGCATGTAGACCAGGACCTA | chr12:57751257-57751280_− |
| CDK5 | ENST00000485972.5 | 226 | ATCTCCCGGAGGGCGGAACT | chr7:151056946-151056969_+ |
| | | 227 | TCTGCATCGCGGCGGCCGCG | chr7:151057841-151057864_+ |
| | | 228 | GAGGCTGGATGACGATGATG | chr7:151057070-151057093_− |
| | | 229 | TTTCTCGTATTTCTGCATCG | chr7:151057830-151057853_+ |
| | | 230 | TCCATCGACATGTGGTCAGC | chr7:151055290-151055313_− |
| CDK6 | ENST00000265734.8 | 231 | GAAGAACGGAGGCCGTTTCG | chr7:92833202-92833225_− |
| | | 232 | CCACTGAGGTTAGAGCCATC | chr7:92725624-92725647_+ |
| | | 233 | AGTTCAGATGTTGATCAACT | chr7:92623047-92623070_− |
| | | 234 | AACATTCTGGTGACCAGCAG | chr7:92725692-92725715_− |
| | | 235 | CCGCATCTATAGTTTCCAGA | chr7:92725639-92725662_− |
| CDK7 | ENST00000256443.7 | 236 | TCGGGCTTTACGGCGCCGGA | chr5:69234956-69234979_+ |
| | | 237 | ATTTATGTCCAAAAGCATCA | chr5:69255461-69255484_− |
| | | 238 | ACTTCACGTCCAGAGCCATC | chr5:69234971-69234994_− |
| | | 239 | CAATAGAGCTTATACACATC | chr5:69259903-69259926_+ |
| | | 240 | AACTTTGGGCACACCAACTG | chr5:69269259-69269282_+ |
| CDK9 | ENST00000373264.4 | 241 | GCTTCTAAAACACGAGAATG | chr9:127787555-127787578_+ |
| | | 242 | CGAGCAACAGCTCCGGGGGC | chr9:127788362-127788385_− |
| | | 243 | TCTGCGAGCATGACCTTGCT | chr9:127787994-127788017_+ |
| | | 244 | CGGCCCCCGGAGCTGTTGCT | chr9:127788363-127788386_+ |
| | | 245 | TACCCTTGCAGCGGTTATAG | chr9:127787950-127787973_− |
| CHD1 | ENST00000614616.4 | 246 | ATAGGATGGCTGCTTCTTCA | chr5:98897269-98897292_+ |
| | | 247 | ATTCCTTGGAGGTCTAAATT | chr5:98893581-98893604_− |
| | | 248 | GGCTTCTCAAATGAATGCTG | chr5:98896257-98896280_− |
| | | 249 | TATTATCTGGTGGTTTAATG | chr5:98889107-98889130_+ |
| | | 250 | GCATTGATGAGTATTTTAGC | chr5:98898291-98898314_− |
| CHEK1 | ENST00000428830.6 | 251 | CCAGTTGATGTTTGGTCCTG | chr11:125633299-125633322_+ |
| | | 252 | CAAAATCTCAGACTTTGGCT | chr11:125633169-125633192_+ |
| | | 253 | TTATTTCTGGAGTACTGTAG | chrll:125627784-125627807_+ |
| | | 254 | GAGATTCTTCCATCAACTCA | chr11:125629265-125629288_+ |
| | | 255 | ATGGTATTGGAATAACTCAC | chr11:125629400-125629423_+ |
| CHEK2 | ENST00000328354.10 | 256 | GTTGAGGCTCAGCAGTCTCA | chr22:28734680-28734703_− |
| | | 257 | CGATTATGGGCCCTTCAGGA | chr22:28734416-28734439_− |
| | | 258 | TGCCTGTGGAGAGGTAAAGC | chr22:28711991-28712014_− |
| | | 259 | TGATCAGTCAGTTTATCCTA | chr22:28719434-28719457_− |
| | | 260 | AATACAGAGCTTGTAGGGAA | chr22:28725035-28725058_− |
| CPT1A | ENST00000265641.9 | 261 | TGCAAAAATCAATCGGACTC | chr11:68812443-68812466_− |
| | | 262 | CATCATCACTGGCGTGTACC | chr11:68812548-68812571_− |
| | | 263 | GTGTCTTTGACAGCCGGGAC | chr11:68804009-68804032_+ |
| | | 264 | GTCGGTGAGGCCTCTTATGA | chr11:68799324-68799347_− |
| | | 265 | TTTAATACTTCCCGGATCCC | chr11:68793325-68793348_− |
| CRBN | ENST00000231948.8 | 266 | GCACGATGACGACAGCTGTC | chr3:3174197-3174220_− |
| | | 267 | GCCACCATTTATATGAACAT | chr3:3167647-3167670_+ |
| | | 268 | TGTATGTGATGTCGGCAGAC | chr3:3175162-3175185_+ |
| | | 269 | CCATGTCTGTTTACCCGCAA | chr3:3179683-3179706_+ |
| | | 270 | CGCACCATACTGACTTCTTG | chr3:3174103-3174126_+ |
| CRTC1 | ENST00000321949.12 | 271 | TGGTGTCCAGGCCCGAGGAT | chr19:18745830-18745853_− |
| | | 272 | CGTCATTGTGCTCTGGTGCA | chr19:18749797-18749820_− |
| | | 273 | TGGTGTCCGCGGGTGGTGAG | chr19:18747081-18747104_− |
| | | 274 | CGCGGGTGGTGAGAGGTACA | chr19:18747074-18747097_− |
| | | 275 | CCTCGGGCCTGGACACCAGC | chr19:18745835-18745858_+ |
| CRTC2 | ENST00000368633.1 | 276 | TAACCAGATTGGCTCTGGCC | chr1:153955075-153955098_− |
| | | 277 | GAGCCAATCTGGTTAACATT | chr1:153955083-153955106_+ |
| | | 278 | CATCCTGCCCAGCCGACGTG | chr1:153953265-153953288_− |
| | | 279 | AGAGCCAATCTGGTTAACAT | chr1:153955082-153955105_+ |
| | | 280 | AGTCCCCAGGATACCTACCC | chr1:153953303-153953326_− |
| CSF1R | ENST00000286301.7 | 281 | GGCCACGCAGGAGTAGTTGC | chr5:150077324-150077347_+ |
| | | 282 | TCCTTCCTGGCCAGAAACCC | chr5:150070493-150070516_− |
| | | 283 | TCCTGTGCTAGCACGTTCCA | chr5:150080302-150080325_+ |
| | | 284 | ATCCCAGACCTGCAGCACTT | chr5:150070029-150070052_+ |
| | | 285 | AACGGTGACCTTGCGATGTG | chr5:150080943-150080966_− |
| CSNK2A1 | ENST00000646561.1 | 286 | GATCATAATTGTCATGTCCA | chr20:489781-489804_+ |
| | | 287 | CATCATATTGGCGCTGCTGA | chr20:486379-486402_+ |
| | | 288 | AGCAGCGCCAATATGATGTC | chr20:486374-486397_− |
| | | 289 | GCTTACTGCAAGAGAGGCAA | chr20:487441-487464_− |
| | | 290 | TGAGGATAGCCAAGGTTCTG | chr20:488751-488774_− |
| CSNK2A2 | ENST00000262506.7 | 291 | TAATCAAGATGATTACCAAC | chr16:58196821-58196844_− |
| | | 292 | GACCAAGTTTTCGAACCAGT | chr16:58196806-58196829_+ |
| | | 293 | TTGTCCTGTCCATGGAAGAA | chr16:58167216-58167239_+ |
| | | 294 | GGAACCATTCTTCCATGGAC | chr16:58167220-58167243_− |
| | | 295 | AGCAAGCATGATCTTTCGAA | chr16:58167241-58167264_− |
| CXCR1 | ENST00000295683.2 | 296 | TATTACAGATCCACAGATGT | chr2:218165180-218165203_− |
| | | 297 | TCATCAAAATCCCACATCTG | chr2:218165170-218165193_+ |
| | | 298 | CAGGCTCAGCAGGAACACTA | chr2:218165049-218165072_+ |
| | | 299 | CAGCAGGTAGACATCAGTGA | chr2:218164974-218164997_+ |
| | | 300 | TCTCAGTTTCTAGCATACAG | chr2:218165105-218165128_+ |
| CXCR2 | ENST00000318507.6 | 301 | GGCGGCATCTAGTAGAAAAG | chr2:218134889-218134912_− |
| | | 302 | GGTCAGGGCAAAGAGTAGGT | chr2:218135078-218135101_− |
| | | 303 | CAGGCTCAGCAGGAATACCA | chr2:218134967-218134990_− |
| | | 304 | CAGCAGGTAGACATCAGTGA | chr2:218135042-218135065_− |
| | | 305 | GCGGCATCTAGTAGAAAAGG | chr2:218134888-218134911_− |
| CXCR4 | ENST00000409817.1 | 306 | CTTCTGGGCAGTTGATGCCG | chr2:136115629-136115652_− |
| | | 307 | AGGGAAGCGTGATGACAAAG | chr2:136115650-136115673_+ |
| | | 308 | GCATTTTCTTCACGGAAACA | chr2:136115826-136115849_+ |
| | | 309 | AGGGGACTATGACTCCATGA | chr2:136115851-136115874_− |
| | | 310 | GAAGCGTGATGACAAAGAGG | chr2:136115653-136115676_+ |
| CYP17A1 | ENST00000369887.3 | 311 | TCGCTGACTCTGGCGCACAC | chr10:102835326-102835349_− |
| | | 312 | TGGGCCAAAACAAATAAGCT | chr10:102837306-102837329_+ |
| | | 313 | GCCTGGTGGACCTAGTCCCC | chr10:102834790-102834813_− |
| | | 314 | GGTATCGCCTTCGCTGACTC | chr10:102835336-102835359_− |
| | | 315 | GATTGTCGGCCACCACCAGC | chr10:102837117-102837140_− |
| CYP19A1 | ENST00000396402.5 | 316 | CCAATTCCCATGCAGTAGCC | chr15:51236984-51237007_+ |
| | | 317 | CATTATGTGGAACATACTTG | chr15:51227908-51227931_+ |
| | | 318 | GCGAGTCTGGATCTCTGGAG | chr15:51236877-51236900_− |
| | | 319 | GTGACCATACGAACAAGGCC | chr15:51222491-51222514_+ |
| | | 320 | TGTGACCATACGAACAAGGC | chr15:51222490-51222513_+ |
| DDR2 | ENST00000367922.7 | 321 | TCTCTTGGCGGAACCGTCAT | chr1:162754826-162754849_+ |
| | | 322 | AGATAAATGATGGAACCTCC | chr1:162755710-162755733_− |
| | | 323 | TGTCTTACAATGCTCCAGCT | chr1:162755672-162755695_+ |
| | | 324 | CGATGCCATGACCTCCTGCA | chr1:162754752-162754775_− |
| | | 325 | TCACTCTGGTGGGGACCCAG | chr1:162754727-162754750_+ |
| DHFR | ENST00000439211.6 | 326 | GTAGACATGGTCTGGATAGT | chr5:80637901-80637924_− |
| | | 327 | CCTCCCGCTGCTGTCATGGT | chr5:80654481-80654504_− |
| | | 328 | GACATGGTCTGGATAGTTGG | chr5:80637898-80637921_− |
| | | 329 | CGAACCAACCATGACAGCAG | chr5:80654477-80654500_+ |
| | | 330 | CCAACCATGACAGCAGCGGG | chr5:80654481-80654504_+ |
| DHH | ENST00000649637.1 | 331 | CCTGGGCGCCAGTGGGCCAG | chr12:49094322-49094345_− |
| | | 332 | AGCGGACCCTGGGCGCCAGT | chr12:49094329-49094352_− |
| | | 333 | TTGTGCCCGGCGTGCCAGAG | chr12:49094347-49094370_− |
| | | 334 | GCCATGGATACAGCGGACCT | chr12:49094507-49094530_+ |
| | | 335 | TAGATTGGTCAGGAGAGCCA | chr12:49094491-49094514_+ |
| DHX9 | ENST00000367549.3 | 336 | CAAGGATTCCAGTTGGATTG | chr1:182858834-182858857_− |
| | | 337 | GTCAGACAACTGTACCATCT | chr1:182858168-182858191_+ |
| | | 338 | TGGTGTTCCTGGGCCCACCT | chr1:182853336-182853359_+ |
| | | 339 | ACTTGGTTTTGTCGCTGAGA | chr1:182858789-182858812_− |
| | | 340 | GCGACAAAACCAAGTGGGTG | chr1:182858797-182858820_+ |
| DNMT1 | ENST00000340748.8 | 341 | CCTGAGGTTTCCGTTTGGCA | chr19:10175595-10175618_+ |
| | | 342 | ATAAATGAATGGTGGATCAC | chr19:10155893-10155916_− |
| | | 343 | ACTGAATGCACTTGGGAGGG | chr19:10159897-10159920_+ |
| | | 344 | CTGAATGCACTTGGGAGGGT | chr19:10159898-10159921_+ |
| | | 345 | GAAGCAGGTCAGTTTGTGCT | chr19:10159659-10159682_+ |
| DOT1L | ENST00000398665.7 | 346 | GTCGATAGTGTGCAGGTAGT | chr19:2207648-2207671_− |
| | | 347 | CGGCAGCGGCCACGGGTAGA | chr19:2164236-2164259_− |
| | | 348 | CAGAGGTGCAAAGGGTTTCG | chr19:2206743-2206766_− |
| | | 349 | AGTTGGTGGCAGCAGCAACC | chr19:2193707-2193730_− |
| | | 350 | ATAGTGATGTTTGCAGTTGG | chr19:2193721-2193744_− |
| DPP4 | ENST00000360534.7 | 351 | AGTTACAGAATCACATGGAC | chr2:162038348-162038371_− |
| | | 352 | GTCCATGTGATTCTGTAACT | chr2:162038351-162038374_+ |
| | | 353 | ATGATGAATCCAGTGGAAGA | chr2:162024815-162024838_− |
| | | 354 | GATTATTCAATATCTCCTGA | chr2:162045565-162045588_− |
| | | 355 | CCCGTGGTTCTGCTGAACAA | chr2:162073400-162073423_− |
| DRD2 | ENST00000362072.7 | 356 | TTCCCGTCTGACCCGTTGAA | chr11:113424568-113424591_+ |
| | | 357 | CTTCAACGGGTCAGACGGGA | chr11:113424566-113424589_− |
| | | 358 | CGGCCCTTCAACGGGTCAGA | chr11:113424571-113424594_− |
| | | 359 | GAGGCTGACGATCAGGTAGT | chr11:113424423-113424446_+ |
| | | 360 | TGTGTGCCATCAGCATCGAC | chr11:113418025-113418048_− |
| EDNRA | ENST00000324300.10 | 361 | TGGGTTGATGAGTGGTAACC | chr4:147485821-147485844_− |
| | | 362 | GAAGTAATTTTAGTCTGCTG | chr4:147485888-147485911_− |
| | | 363 | TCCATCTTGAGGCAAATTTG | chr4:147485663-147485686_− |
| | | 364 | ATTTTCATCGTGGGAATGGT | chr4:147485948-147485971_+ |
| | | 365 | TCTGCGCTCTTAGTGTTGAC | chr4:147519956-147519979_+ |
| EGFR | ENST00000275493.6 | 366 | TAAATGCCACCGGCAGGATG | chr7:55156632-55156655_− |
| | | 367 | ATCCCAAGGATGTTATGTTC | chr7:55160165-55160188_− |
| | | 368 | AGCTGTCGGCCCCACAGGCT | chr7:55155863-55155886_− |
| | | 369 | CCTTGCACGTGGCTTCGTCT | chr7:55154024-55154047_− |
| | | 370 | GCAGCGCCCGGAGCACTGCT | chr7:55152563-55152586_− |
| EHMT1 | ENST00000460843.5 | 371 | TCCCGTTGGATCAAAGCCCT | chr9:137777940-137777963_− |
| | | 372 | CGGTGAGAGATGCTGCTCTC | chr9:137776638-137776661_− |
| | | 373 | TTGATCCAACGGGACCTGCT | chr9:137777949-137777972_+ |
| | | 374 | CTCCAGCACATCTGGACCGT | chr9:137762680-137762703_− |
| | | 375 | AGCACTCCCCTCCCCAAGGG | chr9:137717069-137717092_− |
| EHMT2 | ENST00000375537.8 | 376 | GACCATCCCCCGGGGTGACG | chr6:31888125-31888148_− |
| | | 377 | GAGTGATGATGTCCACTCAC | chr6:31892840-31892863_− |
| | | 378 | CGGGCCAAGATGTCAATGAC | chr6:31896437-31896460_− |
| | | 379 | GCCTCATGGTCTCCCGCTTG | chr6:31888460-31888483_+ |
| | | 380 | GAGGAGTGGGAGACGGTGGT | chr6:31892470-31892493_− |
| EPHA2 | ENST00000358432.7 | 381 | TCGCGGCCCCCGCTGTCCTG | chr1:16138091-16138114_+ |
| | | 382 | GTGTGCAAGGCATCGACGCT | chr1:16138274-16138297_+ |
| | | 383 | GCTCACTGTCACACTGGTGC | chr1:16137964-16137987_+ |
| | | 384 | GAGGTGGCACCCTCAGGGGA | chr1:16138336-16138359_+ |
| | | 385 | CGTCCAGCGCAGCTCCACCT | chr1:16138117-16138140_+ |
| EPHB4 | ENST00000358173.7 | 386 | GTGTTAGAGTGGCTATTGGC | chr7:100820217-100820240_+ |
| | | 387 | CAGGGCTCCACCAGGTCCCG | chr7:100819684-100819707_+ |
| | | 388 | TCCTGCAGTGTCTGACATCC | chr7:100818617-100818640_− |
| | | 389 | TCCGGGGTTCGAGGCAGCTG | chr7:100822288-100822311_− |
| | | 390 | GCTGTGATGTTCCTGGCCGA | chr7:100817207-100817230_+ |
| ERBB2 | ENST00000269571.9 | 391 | AGCTCTCCGGCAGAAATGCC | chr17:39712418-39712441_− |
| | | 392 | GCCGAATGTATACCGGCCCT | chr17:39710433-39710456_− |
| | | 393 | CCAGAACCTGCAAGTAATCC | chr17:39715497-39715520_+ |
| | | 394 | GGAGCACTTGCGAGAGGTGA | chr17:39712340-39712363_+ |
| | | 395 | TGCGCCCGAGGGCACTGCTG | chr17:39716329-39716352_+ |
| ERBB3 | ENST00000267101.7 | 396 | GTGGTAGCAGAGCTGCCTAT | chr12:56093442-56093465_− |
| | | 397 | GGCCTGTCCTCCTGACAAGA | chr12:56088576-56088599_+ |
| | | 398 | ACTGTCATTGAAGTGCCGGC | chr12:56088021-56088044_− |
| | | 399 | CGTAGGCCCCCGAAGCACCT | chr12:56093481-56093504_− |
| | | 400 | CCAACCTCCGCGTGGTGCGA | chr12:56085058-56085081_+ |
| ERBB4 | ENST00000342788.8 | 401 | TGTGTTCCAGTGATGGCTGT | chr2:211679134-211679157_− |
| | | 402 | TTTTCTAACCTGGTGACCAT | chr2:211704121-211704144_− |
| | | 403 | TTCTAGTCACTGGTATTCAT | chr2:211712048-211712071_− |
| | | 404 | TGGAGGCTGCTCAGGACCTA | chr2:211725089-211725112_− |
| | | 405 | GCTTGTGATGGCATTGGCAC | chr2:211712154-211712177_− |
| ESR1 | ENST00000440973.5 | 406 | CCCCTACGGCCCCGGGTCTG | chr6:151808145-151808168_+ |
| | | 407 | AGCCTCAGACCCGGGGCCGT | chr6:151808147-151808170_− |
| | | 408 | GCTGCGGCGTTCGGCTCCAA | chr6:151808167-151808190_+ |
| | | 409 | AAATTCAGATAATCGACGCC | chr6:151842599-151842622_+ |
| | | 410 | CCCTTGGATCTGATGCAGTA | chr6:151807949-151807972_− |
| ESR2 | ENST00000341099.5 | 411 | AACTGGCGATGGACCACTAA | chr14:64282701-64282724_+ |
| | | 412 | TAGCGATCTTGCTTCACACC | chr14:64282646-64282669_+ |
| | | 413 | AGTGTACAATCGATAAAAAC | chr14:64268855-64268878_− |
| | | 414 | AATGTGTTGTGGCCAACACC | chr14:64282734-64282757_− |
| | | 415 | CAGTAACAGGGCTGGCGCAA | chr14:64280100-64280123_+ |
| EZH2 | ENST00000320356.6 | 416 | GCAATGAGCTCACAGAAGTC | chr7:148846483-148846506_+ |
| | | 417 | TTTAATGGGATGACTTGTGT | chr7:148832700-148832723_+ |
| | | 418 | CTCACCGAACAGCAGCTCCC | chr7:148826599-148826622_− |
| | | 419 | TGTTGGAAAATCCAAGTCAC | chr7:148832717-148832740_+ |
| | | 420 | ACTTCTGTGAGCTCATTGCG | chr7:148846479-148846502_− |
| F2R | ENST00000319211.4 | 421 | GCTGTTGTCTGCCCGCACCC | chr5:76716360-76716383_+ |
| | | 422 | CCATTGTCCCGGGCTCTGCG | chr5:76716288-76716311_− |
| | | 423 | CGGGTGCGGGCAGACAACAG | chr5:76716358-76716381_− |
| | | 424 | GCCGCCTGCTTCAGTCTGTG | chr5:76716334-76716357_+ |
| | | 425 | CCGGGACAATGGGGCCGCGG | chr5:76716299-76716322_+ |
| FCGR1A | ENST00000369168.4 | 426 | CTGGGAGCAGCTCTACACAG | chr1:149784095-149784118_+ |
| | | 427 | TAGAGCTGCTCCCAGGCAGA | chr1:149784087-149784110_− |
| | | 428 | ACCAGCTTGGAGACAACATG | chr1:149782726-149782749_+ |
| | | 429 | AACCGTAACCTTGCACTGTG | chr1:149784060-149784083_+ |
| | | 430 | GCATGACACCTCAAGGCCAG | chr1:149788412-149788435_− |
| FGF1 | ENST00000621536.4 | 431 | TTCCGGATGGCACAGTGGAT | chr5:142613983-142614006_− |
| | | 432 | ACTTGGCCATGGACACCGAC | chr5:142600716-142600739_− |
| | | 433 | CAGATTAAACTTCTCGGTCA | chr5:142614073-142614096_+ |
| | | 434 | TACTTGGCCATGGACACCGA | chr5:142600717-142600740_− |
| | | 435 | GGCCCCCGTTGCTACAGTAG | chr5:142614021-142614044_+ |
| FGF2 | ENST00000644866.2 | 436 | CTGCCCGCCTTGCCCGAGGA | chr4:122827198-122827221_+ |
| | | 437 | GCCGCTTGGGGTCCTTGAAG | chr4:122827245-122827268_− |
| | | 438 | CGGCTGCCATGGTCCCTGCG | chr4:122827161-122827184_− |
| | | 439 | TAACCGTTACCTGGCTATGA | chr4:122876378-122876401_+ |
| | | 440 | TTGGGGTCCTTGAAGTGGCC | chr4:122827240-122827263_− |
| FGFR1 | ENST00000447712.6 | 441 | AAGCACCTCCATCTCTTTGT | chr8:38421899-38421922_+ |
| | | 442 | GGTTTGGGGTCCCACTGGAA | chr8:38427985-38428008_+ |
| | | 443 | ACCCTGCTTGCAGGATGGGC | chr8:38424663-38424686_+ |
| | | 444 | GACTCCGTGCCCGCAGACTC | chr8:38429749-38429772_− |
| | | 445 | CAAGGTCGGGGACGGCCTAG | chr8:38457365-38457388_+ |
| FGFR2 | ENST00000457416.6 | 446 | CAAGTTTCGCTGCCCAGCCG | chr10:121551366-121551389_− |
| | | 447 | CGCACCTCTAGCGACTCCCC | chr10:121565631-121565654_+ |
| | | 448 | ACCCCAGCTGACCATGGTTA | chr10:121593802-121593825_+ |
| | | 449 | GGTTGGCATTGGGTTCCCCC | chr10:121551349-121551372_+ |
| | | 450 | CACCGGCCCATCCTCCAAGC | chr10:121520135-121520158_− |
| FGFR3 | ENST00000440486.7 | 451 | GGGGACGGAGCAGCGCGTCG | chr4:1794008-1794031_+ |
| | | 452 | GCGGAAGCGGACGGTGTTGG | chr4:1801423-1801446_− |
| | | 453 | AATAGAATTGCCCGCCAGGC | chr4:1803773-1803796_− |
| | | 454 | CTTCGGCAGCGGGGATGCTG | chr4:1799293-1799316_+ |
| | | 455 | ACTCCGGGGCCTACAGCTGC | chr4:1799451-1799474_+ |
| FGFR4 | ENST00000292408.8 | 456 | GATGGAGAGCGTGGTGCCCT | chr5:177091710-177091733_+ |
| | | 457 | CGCTACCTCTGCCTGGCACG | chr5:177090589-177090612_+ |
| | | 458 | GCCAGCGGATGGTGGGCGTG | chr5:177091031-177091054_− |
| | | 459 | AGCTGGACAGCGGAACTTGA | chr5:177091000-177091023_− |
| | | 460 | GTACACGGCCAGCAGGTGCC | chr5:177090513-177090536_− |
| FGR | ENST00000374005.7 | 461 | GAGAGGCAGCTGCTTTCACC | chr1:27617239-27617262_− |
| | | 462 | CTTTCACCAGGCAACCCCCA | chr1:27617227-27617250_− |
| | | 463 | ATGTGGGCAAATGAGGATGC | chr1:27623767-27623790_+ |
| | | 464 | CTCGCTTTCCCGAATGAGAA | chr1:27617202-27617225_+ |
| | | 465 | GAGGCTCGGTCTCTCAGCTC | chr1:27621618-27621641_− |
| FKBP1A | ENST00000400137.8 | 466 | GGGCGCACCTTCCCCAAGCG | chr20:1392859-1392882_− |
| | | 467 | TCAGCGTCCGCCGCCGCCAT | chr20:1392993-1393016_− |
| | | 468 | CGCAGGTCTGGCCGCGCTTG | chr20:1392848-1392871_+ |
| | | 469 | CACCTGCACTCCCATGGCGG | chr20:1392983-1393006_+ |
| | | 470 | CAAGCGCGGCCAGACCTGCG | chr20:1392845-1392868_− |
| FLT1 | ENST00000282397.8 | 471 | GTAAGACCGCTTGCCAGCTA | chr13:28430096-28430119_+ |
| | | 472 | TCCCCGAGCCTCAGATCACT | chr13:28384918-28384941_− |
| | | 473 | GTTAGGTGACGTAACCCGGC | chr13:28438241-28438264_+ |
| | | 474 | CTTGACACTTTGATCCCTGA | chr13:28434191-28434214_− |
| | | 475 | CAGGTGCTTGAAACCGTAGC | chr13:28430109-28430132_− |
| FLT3 | ENST00000241453.11 | 476 | GTCCACGTACATCTGATTTG | chr13:28048328-28048351_+ |
| | | 477 | GGTAACCAAAGCTGATTGAC | chr13:28049390-28049413_+ |
| | | 478 | TCCACGTACATCTGATTTGT | chr13:28048329-28048352_+ |
| | | 479 | CCCAGGTGAGCCCGAATCCA | chr13:28049660-28049683_+ |
| | | 480 | GAGCAAAAGGGTCTTGATAA | chr13:28048280-28048303_− |
| FLT4 | ENST00000261937.10 | 481 | GACGTAGCTGCCTGTGTCGT | chr5:180630624-180630647_+ |
| | | 482 | GTCAAGTTCTGCGTGAGCCG | chr5:180621218-180621241_+ |
| | | 483 | CCCGTAGGCCGTGCAGGTGA | chr5:180625942-180625965_+ |
| | | 484 | GGCATGTGGACTGTGGCGCC | chr5:180626219-180626242_+ |
| | | 485 | TCTTTGTACCACACGATGCT | chr5:180621131-180621154_+ |
| FNTA | ENST00000302279.7 | 486 | GTGACTTCAAAAGAACTCTC | chr8:43069560-43069583_− |
| | | 487 | CTACATCACTGCAATAATTG | chr8:43069611-43069634_+ |
| | | 488 | TGTGGACCAACTTCTGAAAG | chr8:43077247-43077270_+ |
| | | 489 | GGGTCGGGGAGGCTGCGCAA | chr8:43056362-43056385_+ |
| | | 490 | TCTTTTGAAGTCACTTCAGA | chr8:43069569-43069592_+ |
| FOLH1 | ENST00000256999.6 | 491 | CCCGCGCTGGCTGTGCGCTG | chr11:49208336-49208359_− |
| | | 492 | TCACGAAACCGACTCGGCTG | chr11:49208372-49208395_− |
| | | 493 | GTGCTAGCTCAACAGAATCC | chr11:49200331-49200354_+ |
| | | 494 | TCTCCTTCACGAAACCGACT | chr11:49208378-49208401_− |
| | | 495 | CAGCCGAGTCGGTTTCGTGA | chr11:49208375-49208398_+ |
| FOLR1 | ENST00000312293.9 | 496 | AGTGTGGGTGGCTGTAGTAG | chr11:72192211-72192234_+ |
| | | 497 | ATGAAATGCCGTTTGCAGGC | chr11:72195381-72195404_− |
| | | 498 | CCAGTTGAATCTATATAGGT | chr11:72195337-72195360_− |
| | | 499 | CTGCAAACGGCATTTCATCC | chr11:72195386-72195409_+ |
| | | 500 | GACATTGAGAAGCTCAGTCC | chr11:72192258-72192281_− |
| FOLR2 | ENST00000298223.10 | 501 | CTGGGACCACTGCGGCAAGA | chr11:72220955-72220978_+ |
| | | 502 | CGGGCTCCATCTTGCCGCAG | chr11:72220961-72220984_− |
| | | 503 | TGGCATCCATACAGACATTG | chr11:72218664-72218687_− |
| | | 504 | GTCCTGGGCACTGCACATGG | chr11:72218630-72218653_− |
| | | 505 | TGATCTCCTCAATGTCTGTA | chr11:72218658-72218681_+ |
| FOLR3 | ENST00000611028.2 | 506 | CCTGGGGCCCTGGATCCGGC | chr11:72139127-72139150_+ |
| | | 507 | ATAAAGTGGCGCTTGCAGGT | chr11:72139071-72139094_− |
| | | 508 | GGCCATACAGCTCGTCCTCG | chr11:72136095-72136118_− |
| | | 509 | TGGCTTTGGTGACTGCTGCG | chr11:72135989-72136012_+ |
| | | 510 | GTTAAAGTTGTACAGGCGGG | chr11:72139024-72139047_− |
| FRK | ENST00000606080.1 | 511 | AGATGTTGCTCATTGTGCCT | chr6:116060298-116060321_+ |
| | | 512 | GGCTGAGGACAGAAGCCTAC | chr6:116059974-116059997_− |
| | | 513 | TCAACCGTGATTGAAAATCC | chr6:116060213-116060236_− |
| | | 514 | GTTGCTCATTGTGCCTTGGT | chr6:116060302-116060325_+ |
| | | 515 | GGCTCCAGTCAGCAACTACA | chr6:116060018-116060041_− |
| FYN | ENST00000354650.7 | 516 | CGAAGCTGGGGTAGTGCTGA | chr6:111719924-111719947_+ |
| | | 517 | TTACATTCCCAGCAATTATG | chr6:111707949-111707972_− |
| | | 518 | GTCCTTGGCCCCCGGCTGCG | chr6:111719870-111719893_+ |
| | | 519 | CCGAAGCTGGGGTAGTGCTG | chr6:111719923-111719946_+ |
| | | 520 | AATGGGCTGTGTGCAATGTA | chr6:111720029-111720052_− |
| FZD8 | ENST00000374694.2 | 521 | GCGCCGCTCATGCGCCAGTA | chr10:35641052-35641075_− |
| | | 522 | GCAGCGCTCTAGCGGCGCTG | chr10:35641350-35641373_− |
| | | 523 | GAGGCGCACAGCATGGAGTG | chr10:35641418-35641441_− |
| | | 524 | GATGCCCTTACACAGCGGCA | chr10:35641291-35641314_+ |
| | | 525 | TAGCCGATGCCCTTACACAG | chr10:35641286-35641309_+ |
| GART | ENST00000381839.7 | 526 | TCGCTTATGGTCCTGTGCTG | chr21:33530821-33530844_+ |
| | | 527 | CACCGCCCTAACTGTTGTCA | chr21:33528214-33528237_− |
| | | 528 | GGAATAATGCTGACCAAGAA | chr21:33528567-33528590_− |
| | | 529 | AAACAAGTGTTGGTTGCCCC | chr21:33539211-33539234_− |
| | | 530 | CGCTTATGGTCCTGTGCTGG | chr21:33530822-33530845_+ |
| GNRH1 | ENST00000276414.4 | 531 | TCCTCCAGGGCGCAGTCCAT | chr8:25423228-25423251_+ |
| | | 532 | CTACTGACTTGGTGCGTGGA | chr8:25423271-25423294_− |
| | | 533 | TATTCTACTGACTTGGTGCG | chr8:25423275-25423298_− |
| | | 534 | AGCTCCTTTCAGGTCTCGGA | chr8:25421575-25421598_+ |
| | | 535 | GGGAGAACGTGGCTGGTGCG | chr8:25421596-25421619_+ |
| GNRHR | ENST00000226413.4 | 536 | CTGATTGTCATGCCACTGGA | chr4:67754039-67754062_− |
| | | 537 | TCATGCCACTGGATGGGATG | chr4:67754032-67754055_− |
| | | 538 | GTAACTCTCCAGCATACCAT | chr4:67753998-67754021_+ |
| | | 539 | TGATTGTCATGCCACTGGAT | chr4:67754038-67754061_− |
| | | 540 | AAAGACACTACTGAGGATCC | chr4:67753825-67753848_+ |
| GSK3A | ENST00000222330.7 | 541 | TACACGGACATCAAAGTGAT | chr19:42240048-42240071_− |
| | | 542 | CTCTGGGCCTTGGCCTAGAG | chr19:42240089-42240112_+ |
| | | 543 | CACTAGCTTCCCGCCGCCCG | chr19:42242194-42242217_− |
| | | 544 | TTGGGGTCGTGTACCAGGCA | chr19:42240014-42240037_− |
| | | 545 | TCACGGCCCAGCTTCACCCC | chr19:42242178-42242201_+ |
| GSK3B | ENST00000316626.5 | 546 | CGTTATTTCTTCTACTCCAG | chr3:119947274-119947297_− |
| | | 547 | CGGCTTGCAGCTCTCCGCAA | chr3:120093386-120093409_+ |
| | | 548 | CTCCTGGGCAGGGTCCAGAC | chr3:120002177-120002200_− |
| | | 549 | TTCATGCTGCCAAAAGCTGA | chr3:120093354-120093377_+ |
| | | 550 | CAACAGTGGTGGCAACTCCT | chr3:120002192-120002215_− |
| HCK | ENST00000534862.6 | 551 | GCTGCCCGCGAGACGAGGAG | chr20:32052455-32052478_+ |
| | | 552 | AGGACAGTGTGGGCTGGCGC | chr20:32071723-32071746_− |
| | | 553 | AGGCTCGATCCCTGGCCACC | chr20:32074639-32074662_+ |
| | | 554 | AGAATGTATTGCCTCCGACC | chr20:32071688-32071711_− |
| | | 555 | GCGCCCGCTCCTCGTCTCGC | chr20:32052459-32052482_− |
| HDAC1 | ENST00000373548.7 | 556 | TTCGGTGAGGCTTCATTGGG | chr1:32302651-32302674_− |
| | | 557 | CCCAGGAACTGGGGACCTAC | chr1:32327655-32327678_+ |
| | | 558 | AGTAGTAACAGACTTTCCTC | chr1:32292189-32292212_− |
| | | 559 | GTACTCTCCATACTTATGAA | chr1:32327630-32327653_− |
| | | 560 | TTACGTCAATGATATCGTCT | chr1:32327035-32327058_+ |
| HDAC10 | ENST00000216271.9 | 561 | GTGTAGCCCGTGTTTCTGCT | chr22:50249861-50249884_+ |
| | | 562 | CTCCCGGGCACCATGGCCAG | chr22:50249939-50249962_− |
| | | 563 | TGTGCAAAATGGGCTTGCCC | chr22:50250066-50250089_− |
| | | 564 | GAGTCAGATGCAGACGCAGT | chr22:50249373-50249396_− |
| | | 565 | CAGCGTTTCCCATCCCAACC | chr22:50249149-50249172_+ |
| HDAC11 | ENST00000295757.7 | 566 | CAACATCACCTTCATGGGCC | chr3:13481314-13481337_+ |
| | | 567 | CAAAGGGATGCAGCTTCTCC | chr3:13481332-13481355_− |
| | | 568 | CCCTTTGATGCCGGAAAATG; | chr3:13481348-13481371_+ |
| | | 569 | AAGCTGCATCCCTTTGATGC | chr3:13481339-13481362_+ |
| | | 570 | AACGGGGGGGATTTCTGTGA | chr3:13496754-13496777_− |
| HDAC2 | ENST00000519065.5 | 571 | GATATGGCTGTTAATTGGGC | chr6:113956096-113956119_− |
| | | 572 | GAGCCCATGGCGTACAGTCA | chr6:113970891-113970914_− |
| | | 573 | GGGGAATACTTTCCTGGCAC | chr6:113953286-113953309_− |
| | | 574 | TCTTCGGCAGTGGCTTTATG | chr6:113958740-113958763_+ |
| | | 575 | TTCCTGGCACAGGAGACTTG | chr6:113953276-113953299_− |
| HDAC3 | ENST00000305264.7 | 576 | CGAGCAGAACTCAAAGAGCC | chr5:141630091-141630114_+ |
| | | 577 | TCATGTTGGGAGGCCTGGTA | chr5:141634921-141634944_+ |
| | | 578 | TGGTGGGGCTGACTCTCTGC | chr5:141634862-141634885_+ |
| | | 579 | CCAGGCGATGGGGCTTCATA | chr5:141636597-141636620_+ |
| | | 580 | GATATTGCCATTAACTGGGC | chr5:141629887-141629910_− |
| HDAC4 | ENST00000345617.7 | 581 | GTCGACACTCCGCTCTGGGG | chr2:239156716-239156739_+ |
| | | 582 | GCCTGGGGCGCTGCTGCACG | chr2:239139770-239139793_+ |
| | | 583 | GTGACGAGGGGTGCTTGTGC | chr2:239134246-239134269_+ |
| | | 584 | CAAGGGCGAGGTGCTCAGGT | chr2:239134332-239134355_+ |
| | | 585 | CTCCACGCACAGTCCTTGGT | chr2:239126639-239126662_− |
| HDAC5 | ENST00000225983.10 | 586 | TGTGCAGAGAAGTCCGCGGC | chr17:44110743-44110766_+ |
| | | 587 | AGCAGGGAGGCATGCCCGTG | chr17:44091322-44091345_+ |
| | | 588 | CGGGCAGTCCCCACTAGTGA | chr17:44088565-44088588_− |
| | | 589 | GCCCTCCAGTCCCTGCGGCA | chr17:44091427-44091450_− |
| | | 590 | CACGTTCACCCGTCACTAGT | chr17:44088556-44088579_+ |
| HDAC6 | ENST00000334136.10 | 591 | GTTAGCTGGGCGAACCCTGC | chrX:48814979-48815002_− |
| | | 592 | CTGGTTCCAAGGCACATTGA | chrX:48814543-48814566_− |
| | | 593 | CTGAGTCGTAGGTGTCTGCT | chrX:48806427-48806450_− |
| | | 594 | GATATACCATCAATGTGCCT | chrX:48814537-48814560_+ |
| | | 595 | CTTGAGGCTGAAGCACTGGC | chrX:48803136-48803159_+ |
| HDAC7 | ENST00000080059.11 | 596 | TGACCACCGAGCGGCTCTCT | chr12:47795312-47795335_− |
| | | 597 | GTGGGCACCCGGGCTCACCT | chr12:47802245-47802268_+ |
| | | 598 | TAAGGACTGGGCAAAGTGGA | chr12:47795336-47795359_+ |
| | | 599 | GGCTGCAGTAGTGGGCACCC | chr12:47802235-47802258_+ |
| | | 600 | CAGCGGGGCATGAGAGCCTG | chr12:47795593-47795616_+ |
| HDAC8 | ENST00000647594.1 | 601 | GCTGCCCAATGCCTGATTGA | chrX:72567939-72567962_− |
| | | 602 | ACATTCCGTCAATCAGGCAT | chrX:72567934-72567957_+ |
| | | 603 | CATTCCGTCAATCAGGCATT | chrX:72567935-72567958_+ |
| | | 604 | ATCCGGACTCCATAGAATAT | chrX:72568757-72568780_− |
| | | 605 | CCTGGCCAAGATCCCCAAAC | chrX:72572649-72572672_− |
| HDAC9 | ENST00000417496.6 | 606 | AGGTCTGTCCTTAGGTCTAA | chr7:18585324-18585347_− |
| | | 607 | CTAAAGGTGAGATGGGCTCC | chr7:18585308-18585331_− |
| | | 608 | CTTAGGTCTAAAGGTGAGAT | chr7:18585315-18585338_− |
| | | 609 | CCATCTCACCTTTAGACCTA | chr7:18585316-18585339_+ |
| | | 610 | TCAGCTTCAGGAGCATATCA | chr7:18585500-18585523_+ |
| HPRT1 | ENST00000298556.7 | 611 | GTCGCCATAACGGAGCCGGC | chrX:134460296-134460319_− |
| | | 612 | GCGGGTCGCCATAACGGAGC | chrX:134460300-134460323_− |
| | | 613 | CTCATGGACTAATTATGGAC | chrX:134473443-134473466_+ |
| | | 614 | AAAATCTACAGTCATAGGAA | chrX:134475320-134475343_− |
| | | 615 | GCCCCCCTTGAGCACACAGA | chrX:134475236-134475259_− |
| HPSE | ENST00000405413.6 | 616 | CTGGCAATCTCAAGTCAACC | chr4:83322218-83322241_− |
| | | 617 | CCTTGGAAGAGCAGTAGTCC | chr4:83313143-83313166_+ |
| | | 618 | TGGCGTCAATGGTGACGGAC | chr4:83334592-83334615_+ |
| | | 619 | ACGACGTCCTGTGCTTGCGC | chr4:83334666-83334689_+ |
| | | 620 | CATTGACGCCAACCTGGCCA | chr4:83334580-83334603_− |
| HSP90AA1 | ENST00000216281.12 | 621 | ACGATGATGAGCAGTACGCT | chr14:102085800-102085823_− |
| | | 622 | GATCAAAAGGAGCACGTCGT | chr14:102084494-102084517_+ |
| | | 623 | TCTCACGGGATATGTTTAGA | chr14:102083926-102083949_+ |
| | | 624 | AGATCAAAAGGAGCACGTCG | chr14:102084493-102084516_+ |
| | | 625 | CGATGATGAGCAGTACGCTT | chr14:102085799-102085822_− |
| HSPA1A | ENST00000375651.6 | 626 | CACCACCTACTCCTGCGTGG | chr6:31815791-31815814_+ |
| | | 627 | GTGTTGGAACACCCCCACGC | chr6:31815802-31815825_− |
| | | 628 | GACCAAGGCATTCTACCCCG | chr6:31816085-31816108_+ |
| | | 629 | CAACGACGGAGACAAGCCCA | chr6:31816040-31816063_+ |
| | | 630 | GGACACCGAGCGGCTCATCG | chr6:31815890-31815913_+ |
| HSPA1B | ENST00000375650.4 | 631 | CAGGTCGATGCCGATCGCCG | chr6:31827960-31827983_− |
| | | 632 | CACCACCTACTCCTGCGTGG | chr6:31827985-31828008_+ |
| | | 633 | GTGTTGGAACACCCCCACGC | chr6:31827996-31828019_− |
| | | 634 | CAACGACGGAGACAAGCCCA | chr6:31828234-31828257_+ |
| | | 635 | GGACACCGAGCGGCTCATCG | chr6:31828084-31828107_+ |
| HSPB1 | ENST00000248553.6 | 636 | GCATAGCCGCCTCTTCGACC | chr7:76302783-76302806_+ |
| | | 637 | GAGTGGTCGCAGTGGTTAGG | chr7:76302832-76302855_+ |
| | | 638 | TGCCGGAGGAGTGGTCGCAG | chr7:76302824-76302847_+ |
| | | 639 | CAGCCGGCAACTCAGCAGCG | chr7:76302942-76302965_+ |
| | | 640 | CGGGCTGCCCCGGCTGCCGG | chr7:76302810-76302833_+ |
| IDH1 | ENST00000345146.6 | 641 | TGGGTAAAACCTATCATCAT | chr2:208248390-208248413_− |
| | | 642 | ACCCATCCACTCACAAGCCG | chr2:208248408-208248431_+ |
| | | 643 | AATATCCCCCGGCTTGTGAG | chr2:208248414-208248437_− |
| | | 644 | CCCCCGGCTTGTGAGTGGAT | chr2:208248409-208248432_− |
| | | 645 | CCCATCCACTCACAAGCCGG | chr2:208248409-208248432_+ |
| IDH2 | ENST00000330062.7 | 646 | GATGTTCCGGATAGTTCCAT | chr15:90088694-90088717_+ |
| | | 647 | CCAAGCCCATCACCATTGGC | chr15:90088604-90088627_− |
| | | 648 | GTTCGCTCTCCAGCTTGGGA | chr15:90102386-90102409_− |
| | | 649 | TTGGGATGGCCGGCTACCTG | chr15:90102372-90102395_− |
| | | 650 | AACATCCCACGCCTAGTCCC | chr15:90088632-90088655_− |
| IDO1 | ENST00000522495.5 | 651 | CACACGCTATGGAAAACTCC | chr8:39913926-39913949_+ |
| | | 652 | ATGGCATATGTGTGGGGCAA | chr8:39918165-39918188_+ |
| | | 653 | CTTTGCTCTGCCAAATCCAC | chr8:39913987-39914010_+ |
| | | 654 | GCATCACCATGGCATATGTG | chr8:39918157-39918180_+ |
| | | 655 | CATCACCATGGCATATGTGT | chr8:39918158-39918181_+ |
| IFNAR1 | ENST00000270139.7 | 656 | TGGGTGTTGTCCGCAGCCGC | chr21:33325109-33325132_+ |
| | | 657 | AGTGTTATGTGGGCTTTGGA | chr21:33343347-33343370_+ |
| | | 658 | ATAGTGATACACATCTCTCC | chr21:33343314-33343337_+ |
| | | 659 | GAACAAAAGATAGTGTTATG | chr21:33343336-33343359_+ |
| | | 660 | AAGCAGCACTACTTACGTCA | chr21:33343610-33343633_+ |
| IFNAR2 | ENST00000342136.8 | 661 | TACAGCAATGTATAGTGAGT | chr21:33245039-33245062_− |
| | | 662 | TGTATAGTGAGTTGGTACAA | chr21:33245031-33245054_− |
| | | 663 | AGTGAGTTGGTACAATGGAG | chr21:33245026-33245049_− |
| | | 664 | CATATGAAATACCAAACACG | chr21:33243682-33243705_− |
| | | 665 | AAACCAACAATCTCAAACTC | chr21:33248722-33248745_− |
| IGF1R | ENST00000650285.1 | 666 | CTCTCGCTCTGGCCGACGAG | chr15:98649647-98649670_+ |
| | | 667 | CAGCCCATGTAGTAAGATGC | chr15:98913144-98913167_− |
| | | 668 | GTTTTGGGGCAGGCGCAGCA | chr15:98916766-98916789_− |
| | | 669 | GTAAACGGCGTACTGAGTCC | chr15:98913171-98913194_− |
| | | 670 | ACACATCGGCTTCTCCTCCA | chr15:98708020-98708043_− |
| IHH | ENST00000295731.6 | 671 | CTGAACTGCTTGTAGGCGAG | chr2:219060309-219060332_+ |
| | | 672 | GCAGCTTCACACCGGGCCAC | chr2:219057627-219057650_+ |
| | | 673 | CCGCAATAAGTATGGACTGC | chr2:219057510-219057533_− |
| | | 674 | TGTGAAGCTGCGGGTGACCG | chr2:219057615-219057638_− |
| | | 675 | GTGAAGCTGCGGGTGACCGA | chr2:219057614-219057637_− |
| IKBKB | ENST00000520810.6 | 676 | AGTCTTTGCACATCATTCGT | chr8:42306393-42306416_+ |
| | | 677 | ACTGCCAAGGAGGAGATCTC | chr8:42290247-42290270_+ |
| | | 678 | ATCTCGGGCAGCCACCACAT | chr8:42290166-42290189_− |
| | | 679 | TGAAAGAGCGCCTTGGGACA | chr8:42272149-42272172_+ |
| | | 680 | GGGCAGCCACCACATTGGGG | chr8:42290161-42290184_− |
| IL1B | ENST00000263341.6 | 681 | GATCACTGAACTGCACGCTC | chr2:112832746-112832769_− |
| | | 682 | GCAGGCCGCGTCAGTTGTTG | chr2:112833466-112833489_− |
| | | 683 | TCCCATGTGTCGAAGAAGAT | chr2:112832801-112832824_+ |
| | | 684 | CTACAGCAAGGGCTTCAGGC | chr2:112833484-112833507_− |
| | | 685 | GTGCAGTTCAGTGATCGTAC | chr2:112832753-112832776_+ |
| IL2RA | ENST00000379959.7 | 686 | CTCACGTTCATCATGGTGCC | chr10:6062098-6062121_− |
| | | 687 | TCACTCTATATGCTCTGTAC | chr10:6025883-6025906_− |
| | | 688 | GGGACTGCTCACGTTCATCA | chr10:6062105-6062128_− |
| | | 689 | ATGGCTTTGAATGTGGCGTG | chr10:6025973-6025996_+ |
| | | 690 | GCAAAGTCCAATGCAGCCAG | chr10:6024261-6024284_− |
| 1L2RB | ENST00000216223.9 | 691 | CGGCCAGGCATGGACTTGGC | chr22:37143528-37143551_+ |
| | | 692 | GGCCCAGGATGCTTGACTCA | chr22:37142460-37142483_+ |
| | | 693 | CCCATCTTGGCTCCAGACAC | chr22:37143567-37143590_+ |
| | | 694 | ACTCACGGGGAGCAGCTCAC | chr22:37142475-37142498_+ |
| | | 695 | CTGTGTCTGGAGCCAAGATG | chr22:37143566-37143589_− |
| 1L2RG | ENST00000374202.6 | 696 | TTGTTCAGCTCCAGGACCCA | chrX:71110549-71110572_− |
| | | 697 | AAACACTGAACCTCTGGGAG | chrX:71110977-71111000_+ |
| | | 698 | CCTGTCTCCTGGGTTCCCGT | chrX:71110533-71110556_+ |
| | | 699 | AAAACACTGAACCTCTGGGA | chrX:71110976-71110999_+ |
| | | 700 | TTTCTTCAGAGAATAGATAG | chrX:71110626-71110649_+ |
| IL6 | ENST00000404625.5 | 701 | GTTCATAGCTGGGCTCCTGG | chr7:22727245-22727268_− |
| | | 702 | TGGAGAAGGAGTTCATAGCT | chr7:22727255-22727278_− |
| | | 703 | GGAAGGCAGCAGGCAACACC | chr7:22727480-22727503_− |
| | | 704 | TTTGTCAATTCGTTCTGAAG | chr7:22727566-22727589_− |
| | | 705 | CTTCCAATCTGGATTCAATG | chr7:22728784-22728807_+ |
| IL6R | ENST00000368485.7 | 706 | CAGCAATGTTGTTTGTGAGT | chr1:154430528-154430551_+ |
| | | 707 | GCACGGCTCCTGGAAGTCTT | chr1:154434532-154434555_− |
| | | 708 | AGCCTTTGTCGTCAGGGATG | chr1:154430563-154430586_− |
| | | 709 | AGCAATGTTGTTTGTGAGTG | chr1:154430529-154430552_+ |
| | | 710 | TTGTTTGTGAGTGGGGTCCT | chr1:154430536-154430559_+ |
| INHA | ENST00000243786.2 | 711 | GGGGCCCCCCGCGGTGACCA | chr2:219572496-219572519_+ |
| | | 712 | GGGGCAGCCGCCTGACTCCA | chr2:219572529-219572552_− |
| | | 713 | GTGCAGCACCATAGCTCACC | chr2:219572363-219572386_− |
| | | 714 | TAGCAGGGCCAGGTGAGCTA | chr2:219572355-219572378_+ |
| | | 715 | CCTGTGTGTGAAGCCCCCCA | chr2:219572561-219572584_− |
| INHBA | ENST00000242208.4 | 716 | TTCCCCCACCCCAGGATCCG | chr7:41700292-41700315_− |
| | | 717 | TTGGCTGAGAGGATTTCTGT | chr7:41700340-41700363_− |
| | | 718 | AGTCGGGGAGAACGGGTATG | chr7:41700070-41700093_− |
| | | 719 | AGATAGAGGATGACATTGGA | chr7:41700047-41700070_− |
| | | 720 | GTGAGGAGTTCCCCCACCCC | chr7:41700300-41700323_− |
| INHBB | ENST00000295228.3 | 721 | CGGCGTGCGTGATGTTGGGC | chr2:120346457-120346480_− |
| | | 722 | TCGTCGCCAGCGGCGCACCA | chr2:120346169-120346192_+ |
| | | 723 | CGTCGTGCGGCGGCTTCCGG | chr2:120346354-120346377_+ |
| | | 724 | GACACCTGTACGTCGTGCGG | chr2:120346344-120346367_+ |
| | | 725 | CAGGACACCTGTACGTCGTG | chr2:120346341-120346364_+ |
| INHBC | ENST00000309668.2 | 726 | CTCAAAGCAGCTCTGGACAC | chr12:57435081-57435104_− |
| | | 727 | CCGCTGGCTCTCCAGTTCCA | chr12:57434983-57435006_− |
| | | 728 | GGTCAGTGTCCAGCATGTGG | chr12:57434955-57434978_+ |
| | | 729 | TGGCTCTCCAGTTCCAAGGT | chr12:57434979-57435002_− |
| | | 730 | GTCAGTGTCCAGCATGTGGG | chr12:57434956-57434979_+ |
| INHBE | ENST00000266646.2 | 731 | TTATTCTGGGACGACTGGTC | chr12:57455703-57455726_− |
| | | 732 | TGGTGCGAGCACAGGGGACA | chr12:57455582-57455605_+ |
| | | 733 | GCCCTCCGGAGACTACAGCC | chr12:57455758-57455781_+ |
| | | 734 | ATGAGTTATTCTGGGACGAC | chr12:57455708-57455731_− |
| | | 735 | GGCCATTCACCAGGAGCATG | chr12:57455519-57455542_+ |
| ITK | ENST00000422843.7 | 736 | GAAGCGGACTTTAAAGTTCG | chr5:157181044-157181067_− |
| | | 737 | CTACCAAACCAATGATCCTC | chr5:157222909-157222932_+ |
| | | 738 | GACGATCTTCAAAGTATGCC | chr5:157181087-157181110_− |
| | | 739 | TGGACAGTTCTGAGATTCAC | chr5:157222968-157222991_+ |
| | | 740 | ATCTTCAAAGTATGCCAGGC | chr5:157181083-157181106_− |
| JAK1 | ENST00000342505.4 | 741 | GTCCATCCTGCTCGGTCTTG | chr1:64869410-64869433_+ |
| | | 742 | TGGGGTCTCGAATAGGAGCC | chr1:64869428-64869451_+ |
| | | 743 | CAGCTGGCTCATGGGGTAGA | chr1:64850839-64850862_+ |
| | | 744 | TCGAAACTCAGCTGGCTCAT | chr1:64850831-64850854_+ |
| | | 745 | GATATTGAGAACGAGTGTCT | chr1:64869385-64869408_− |
| JAK2 | ENST00000381652.3 | 746 | TGTATATTTTCAAGCACGGC | chr9:5064993-5065016_− |
| | | 747 | TCTTTTGAATTGTTACCAGA | chr9:5069122-5069145_+ |
| | | 748 | GTTCTGAAAAAGACTCTGCA | chr9:5021968-5021991_+ |
| | | 749 | AAGAAAGCAGGTAATCAGAC | chr9:5066702-5066725_+ |
| | | 750 | TGTACTTCGATGCAGTCCTA | chr9:5066731-5066754_+ |
| JAK3 | ENST00000458235.5 | 751 | CGGCGGCATCGCCTGGACCC | chr19:17842326-17842349_− |
| | | 752 | CAGCCCACCCACATCATCCT | chr19:17838333-17838356_− |
| | | 753 | CATGTGCTGCTGCCCGCTCG | chr19:17844316-17844339_− |
| | | 754 | GGCGGCATCGCCTGGACCCA | chr19:17842325-17842348_− |
| | | 755 | GCAAAGAGGGAGTGGTACAC | chr19:17843869-17843892_+ |
| KDM1A | ENST00000356634.7 | 756 | TGTCCGTTGGCTTCATAAAG | chr1:23059140-23059163_− |
| | | 757 | GCTGGGCCCGACAGGCCCGC | chr1:23019716-23019739_− |
| | | 758 | GCGGTTCCGCCAGGCCCCCG | chr1:23019805-23019828_− |
| | | 759 | CGGAACCGCCGGGGTCCGCA | chr1:23019819-23019842_+ |
| | | 760 | CTGCTTCTTGAGAAGTCATC | chr1:23050426-23050449_− |
| KDR | ENST00000645273.1 | 761 | ATGTCTGCCTTGCTCAAGAC | chr4:55104688-55104711_− |
| | | 762 | GTATCCAAGTTCTTGCAAAC | chr4:55104806-55104829_+ |
| | | 763 | CTGCACAGGTGTACAATCCT | chr4:55113354-55113377_+ |
| | | 764 | ACCATTTTATTTCTGGGGGT | chr4:55110651-55110674_+ |
| | | 765 | TACTTGTCGTCTGATTCTCC | chr4:55102457-55102480_+ |
| KIF11 | ENST00000260731.4 | 766 | TCCTGCATCTCTCAATCTTG | chr10:92613597-92613620_+ |
| | | 767 | ACGTGGAATTATACCAGCCA | chr10:92609023-92609046_− |
| | | 768 | TAGTGTACGAACTGGAGGAT | chr10:92606336-92606359_+ |
| | | 769 | AATCCCTGTTGACTTTGGGA | chr10:92613455-92613478_+ |
| | | 770 | TGAAGAGTATACCTGGGAAG | chr10:92607215-92607238_+ |
| KIT | ENST00000288135.5 | 771 | ACCAATCTATTGTGGGCTCT | chr4:54723650-54723673_− |
| | | 772 | CTCATCGCGGTAGCTGCGAT | chr4:54657996-54658019_− |
| | | 773 | TGACTTCAATTATGAACGTC | chr4:54703761-54703784_+ |
| | | 774 | CTACTGCTTCGCGTCCAGAC | chr4:54658059-54658082_+ |
| | | 775 | CAGAACGCAGAGAAAATCCC | chr4:54658033-54658056_− |
| KRAS | ENST00000256078.8 | 776 | AGGGACCAGTACATGAGGAC | chr12:25227299-25227322_− |
| | | 777 | TCTCGACACAGCAGGTCAAG | chr12:25227336-25227359_− |
| | | 778 | CAATGAGGGACCAGTACATG | chr12:25227304-25227327_− |
| | | 779 | GGACCAGTACATGAGGACTG | chr12:25227297-25227320_− |
| | | 780 | GGACTCTGAAGATGTACCTA | chr12:25225729-25225752_− |
| LAP3 | ENST00000226299.8 | 781 | CCTCCACAGACGAGAGCTCC | chr4:17583504-17583527_− |
| | | 782 | ACGACTACTCGCCCCGCAGC | chr4:17577483-17577506_− |
| | | 783 | GCAAGAACATCTTGTCGGCT | chr4:17577452-17577475_− |
| | | 784 | CTGGACCACCTCTGAAGGCA | chr4:17581761-17581784_+ |
| | | 785 | GAACAGGAAAACTGGCATGA | chr4:17582341-17582364_+ |
| LCK | ENST00000336890.9 | 786 | TTGCCATCCAGTGGGACTAT | chr1:32274404-32274427_− |
| | | 787 | TCCCTGACCACGGGCCAGGA | chr1:32275345-32275368_+ |
| | | 788 | TGTGGCCAAAGCGAACAGCC | chr1:32275386-32275409_+ |
| | | 789 | CGGGAGAGCGAGAGCACCGC | chr1:32275650-32275673_+ |
| | | 790 | AAGGCGCAGTCCCTGACCAC | chr1:32275336-32275359_+ |
| LDLR | ENST00000558518.5 | 791 | CGCGGCGAGGAGCAAGGCGA | chr19:11089579-11089602_− |
| | | 792 | CCCCGCCGCGGCGAGGAGCA | chr19:11089585-11089608_− |
| | | 793 | AGGGGTCTTTACGTGTTCCA | chr19:11105458-11105481_+ |
| | | 794 | CCTGGGGCTGGAAATTGCGC | chr19:11089555-11089578_+ |
| | | 795 | GCGGGACCACAGGTGAGCAC | chr19:11105335-11105358_− |
| LHCGR | ENST00000294954.11 | 796 | GCTGCCACGAGCGCTGCGCG | chr2:48755589-48755612_− |
| | | 797 | AGCTTTCAGAGGACTTAATG | chr2:48731236-48731259_− |
| | | 798 | GGAAGATTTATAAATGCTCC | chr2:48725690-48725713_+ |
| | | 799 | AGTCGAGTGAGACCGGCCGT | chr2:48755510-48755533_+ |
| | | 800 | GATCACTTTGACAGGGAGGT | chr2:48731267-48731290_+ |
| LIMK1 | ENST00000336180.6 | 801 | TCTCATAGTACTGGTGCGAC | chr7:74096642-74096665_− |
| | | 802 | CGCTTGCCATGAGATGAGGC | chr7:74099134-74099157_− |
| | | 803 | TGACGGGGGTCACCACAGTC | chr7:74099046-74099069_− |
| | | 804 | GCCCATCCGAAATGTGCCCC | chr7:74105952-74105975_+ |
| | | 805 | GATCCGGTCTCCGACGTGGA | chr7:74105912-74105935_− |
| LYN | ENST00000519728.5 | 806 | TAACCAGGAAGGACGCAGAA | chr8:55950697-55950720_+ |
| | | 807 | CTTTGCTGTTTATTGGACGT | chr8:55941964-55941987_− |
| | | 808 | TTTCAAGGATATAACCAGGA | chr8:55950686-55950709_+ |
| | | 809 | AAAGACAGCTTGAGTGACGA | chr8:55941883-55941906_+ |
| | | 810 | CAACGTCCAATAAACAGCAA | chr8:55941965-55941988_+ |
| MAP1A | ENST00000300231.5 | 811 | CTCTAGCAGTTACAGCGACT | chr15:43521820-43521843_+ |
| | | 812 | TCCACTGGGGACTGATGAAA | chr15:43524497-43524520_− |
| | | 813 | CTCCCGTACTGAAGCTACGC | chr15:43524103-43524126_+ |
| | | 814 | AGAAATGGGGCATCTGATGC | chr15:43525177-43525200_+ |
| | | 815 | TGAGGCAGGTCGTGGCAGAT | chr15:43528206-43528229_− |
| MAP2 | ENST00000360351.8 | 816 | AAAGTTAAATCCAAGGGCTA | chr2:209694301-209694324_− |
| | | 817 | AATTAGTGACTTTGGACAGA | chr2:209695316-209695339_+ |
| | | 818 | TATTTCCACTGACAATTTGA | chr2:209695666-209695689_− |
| | | 819 | ACTTTGGACAGATGGCTTCA | chr2:209695324-209695347_+ |
| | | 820 | TGTCTCTGGCTGAGAAACTA | chr2:209692756-209692779_− |
| MAP2K1 | ENST00000307102.9 | 821 | CGTTAACTGCAGAGCCGTCG | chr15:66387388-66387411_− |
| | | 822 | GACGCCCATCCAGCTGAACC | chr15:66387364-66387387_+ |
| | | 823 | GTTAACTGCAGAGCCGTCGG | chr15:66387387-66387410_− |
| | | 824 | CAGCCGCATCTCCTTCCACC | chr15:66485126-66485149_− |
| | | 825 | TGGAGATCAAACCCGCAATC | chr15:66436755-66436778_+ |
| MAP2K2 | ENST00000262948.9 | 826 | GGGCCAGCATCGGGGCTCCG | chr19:4123865-4123888_+ |
| | | 827 | CAGCATTTGCATGGAACACA | chr19:4110507-4110530_− |
| | | 828 | CGAGCAGCAGAAGAAGCGGC | chr19:4117558-4117581_− |
| | | 829 | CGGGGAGATCAGCATTTGCA | chr19:4110516-4110539_− |
| | | 830 | CTTCCTCCGGGCCAGCATCG | chr19:4123857-4123880_+ |
| MAP3K7 | ENST00000369329.7 | 831 | TGTGAAGATAAGCCACTCCT | chr6:90560121-90560144_+ |
| | | 832 | CGAGTCATCAGGCTCTCAAT | chr6:90552121-90552144_+ |
| | | 833 | TTTACAGTGTTCCCAAGGAG | chr6:90560133-90560156_− |
| | | 834 | GTGAAGATAAGCCACTCCTT | chr6:90560122-90560145_+ |
| | | 835 | TCCATTGAAGGGCGCTGGGA | chr6:90552082-90552105_+ |
| MAP3K8 | ENST00000263056.5 | 836 | TCCTCGGGGCGCCTTTGGAA | chr10:30447876-30447899_+ |
| | | 837 | TTCCTGTAAGTCAGCTTCCA | chr10:30447835-30447858_− |
| | | 838 | ATGACAACCATGGTACCTCT | chr10:30439138-30439161_− |
| | | 839 | CCGATGTTCTCCTGATCCCC | chr10:30447818-30447841_+ |
| | | 840 | GTAATGGAGTACATGAGCAC | chr10:30438935-30438958_+ |
| MAPK1 | ENST00000215832.10 | 841 | CGGGCCCGGAGATGGTCCGC | chr22:21867392-21867415_− |
| | | 842 | GCGGGCCCGGAGATGGTCCG | chr22:21867393-21867416_− |
| | | 843 | CCGCGGGCAGGTGTTCGACG | chr22:21867376-21867399_− |
| | | 844 | TTCTCTACCAGATCCTCAGA | chr22:21805933-21805956_− |
| | | 845 | GTGTGGCCACATATTCTGTC | chr22:21799049-21799072_+ |
| MAPK11 | ENST00000330651.10 | 846 | GACATGTCGGGCCCTCGCGC | chr22:50270272-50270295_− |
| | | 847 | GCCGGTAGAAGCCGGCGCGA | chr22:50270261-50270284_+ |
| | | 848 | ACTCGGCCGGGATCATCCAC | chr22:50267256-50267279_− |
| | | 849 | CGGTCTTGTTCAGCTCCTGC | chr22:50270243-50270266_+ |
| | | 850 | CTCGGCCGGGATCATCCACC | chr22:50267255-50267278_− |
| MAPK14 | ENST00000229794.8 | 851 | GCATGAATGATGGACTGAAA | chr6:36052753-36052776_− |
| | | 852 | AAGTAACCGCAGTTCTCTGT | chr6:36052784-36052807_− |
| | | 853 | ATTCAGCTGACATAATTCAC | chr6:36073697-36073720_+ |
| | | 854 | TACACCTGCAAGGTCTCTGG | chr6:36059311-36059334_+ |
| | | 855 | TACCAGAACCTGTCTCCAGT | chr6:36028226-36028249_+ |
| MAPK3 | ENST00000263025.8 | 856 | TTTGTGATTTCGGCCTGGCC | chr16:30118139-30118162_− |
| | | 857 | GGGGAGCCCCGTAGAACCGA | chr16:30123153-30123176_− |
| | | 858 | CACATACTCCGTCAGGAAGC | chr16:30118091-30118114_+ |
| | | 859 | GCGTAGCCACATACTCCGTC | chr16:30118084-30118107_+ |
| | | 860 | CCACGCGAGTCTTGCGCACG | chr16:30121971-30121994_+ |
| MAPK8 | ENST00000374176.8 | 861 | TAGTAGCGAGTCACTACATA | chr10:48420253-48420276_− |
| | | 862 | GAATCAGACTCATGCCAAGC | chr10:48404914-48404937_+ |
| | | 863 | ACTTTGAAGATTCTTGACTT | chr10:48420193-48420216_+ |
| | | 864 | GCCCATGCCAAGGATGACCT | chr10:48420284-48420307_− |
| | | 865 | GAGTCTGATTCTGAAATGGT | chr10:48404902-48404925_− |
| MAPK9 | ENST00000452135.6 | 866 | TCAGTTTTATAGTGTGCAAG | chr5:180280515-180280538_− |
| | | 867 | AAGCATCTGGTAAAGAAGGT | chr5:180261725-180261748_+ |
| | | 868 | GTAACGTTTTAGGACAGTGA | chr5:180280483-180280506_+ |
| | | 869 | GCTGAAACCAATTGGCTCTG | chr5:180280455-180280478_− |
| | | 870 | GTCACCCATACATCACTGTT | chr5:180241054-180241077_− |
| MCL1 | ENST00000369026.2 | 871 | CTGGAGACCTTACGACGGGT | chr1:150578880-150578903_− |
| | | 872 | CCACCCTCACGCCAGACTCC | chr1:150579308-150579331_− |
| | | 873 | GGGACCTCGGCGCCAATGGG | chr1:150579270-150579293_+ |
| | | 874 | ACCTTACGACGGGTTGGGGA | chr1:150578874-150578897_− |
| | | 875 | GCCATCCCCAACCCGTCGTA | chr1:150578873-150578896_+ |
| MDM2 | ENST00000539479.6 | 876 | TTGAAGTTATTAAAGTCTGT | chr12:68813574-68813597_+ |
| | | 877 | AGACACTTATACTATGAAAG | chr12:68813606-68813629_+ |
| | | 878 | TACCATGATCTACAGGAACT | chr12:68820333-68820356_+ |
| | | 879 | ATCAGTAGGTACAGACATGT | chr12:68809221-68809244_− |
| | | 880 | GCTTCTCTGTGAAAGAGCAC | chr12:68816923-68816946_+ |
| MET | ENST00000397752.7 | 881 | TCCTGTTTACCTTGGTGCAG | chr7:116699124-116699147_+ |
| | | 882 | TTACTTCTTGACGGTCCAAA | chr7:116699860-116699883_+ |
| | | 883 | CAAGGCTGACCATATGTGGC | chr7:116755388-116755411_+ |
| | | 884 | AAGAAAACTAGAGTTCTCCT | chr7:116755447-116755470_+ |
| | | 885 | CTACAAAGAAGTTGATGAAC | chr7:116699653-116699676_− |
| MGMT | ENST00000306010.7 | 886 | TGCGCACCGCGAGGACCTGC | chr10:129467259-129467282_− |
| | | 887 | CTTTGCGTCCCGACGCCCGC | chr10:129467244-129467267_+ |
| | | 888 | GAAATAAAGCTCCTGGGCAA | chr10:129536339-129536362_+ |
| | | 889 | GTGCGCACCGCGAGGACCTG | chr10:129467260-129467283_− |
| | | 890 | GCAAAGCGTTCTAGGGGCGC | chr10:129467227-129467250_− |
| MRE11 | ENST00000323929.7 | 891 | TTTTCTTAATAACTCGAGGC | chr11:94485994-94486017_+ |
| | | 892 | TTCATGAAAATAAGCCCTCA | chr11:94486030-94486053_− |
| | | 893 | CTGTTTTATATCTCACAACC | chr11:94471618-94471641_− |
| | | 894 | GGCAATCATGACGATCCCAC | chr11:94479674-94479697_− |
| | | 895 | CTTTGGACGTTCAATGTCTG | chr11:94478800-94478823_− |
| MS4A1 | ENST00000345732.8 | 896 | GTCCAAAACCACTCTTCAGG | chr11:60462450-60462473_+ |
| | | 897 | TGTAACAGTATTGGGTAGAT | chr11:60466114-60466137_− |
| | | 898 | CGGATCACTCCTGGCAGCAA | chr11:60464298-60464321_+ |
| | | 899 | CTCATGAAGAAGCTTTGCGT | chr11:60462491-60462514_− |
| | | 900 | TGAGGGAATCTAAGACTTTG | chr11:60462510-60462533_+ |
| MSLN | ENST00000382862.7 | 901 | CAATGTGGACCTGCTCCCGA | chr16:764966-764989_+ |
| | | 902 | GGGGCCCCGAGAACGCATCT | chr16:764906-764929_− |
| | | 903 | AAGAAACGGGTGCAGGCCTG | chr16:764925-764948_− |
| | | 904 | GACTCGGCCACAAAGCGCCC | chr16:765175-765198_− |
| | | 905 | GACCCCTGTTGGGGTCCTGT | chr16:762699-762722_+ |
| MST1R | ENST00000296474.7 | 906 | AAGTCGCGAGAGGCCGCGTA | chr3:49903490-49903513_+ |
| | | 907 | ACAAAGTCTTTCCGGGGCAC | chr3:49897661-49897684_+ |
| | | 908 | CCGTGCCAGGCGTGTGTGCA | chr3:49902763-49902786_+ |
| | | 909 | TTTGAGCTGTCCTTGGGCAG | chr3:49898056-49898079_+ |
| | | 910 | CTAAGGGCATGGCATTTCAT | chr3:49898605-49898628_− |
| MTOR | ENST00000361445.8 | 911 | CCAATTCTCCTATTGTTGCC | chr1:11233402-11233425_+ |
| | | 912 | ACAGCTTAGGACATGGTTCA | chr1:11243256-11243279_+ |
| | | 913 | CAAGTACTGCAAAGATCTCA | chr1:11248021-11248044_− |
| | | 914 | TCGCCACCCAGGCATGCCCA | chr1:11240410-11240433_− |
| | | 915 | GCAGCTCCTTGATATCCTGC | chr1:11241580-11241603_+ |
| MUC5AC | ENST00000621226.2 | 916 | CATGGGAAGCTGAGCTGCAT | chr11:1175227-1175250_+ |
| | | 917 | TGGGCTGGCAGGTGCTGACA | chr11:1174924-1174947_− |
| | | 918 | GCCGGCTGCTTCTGCCCTGA | chr11:1164510-1164533_+ |
| | | 919 | AAGGCCATCAAGATTTTCCT | chr11:1177320-1177343_+ |
| | | 920 | GCGTGACACTGAGCCTGGAT | chr11:1167955-1167978_+ |
| NAE1 | ENST00000290810.7 | 921 | TTCCTTCAAAGAAGCAGTAT | chr16:66824858-66824881_− |
| | | 922 | CTTAAAAACTTGGTACTACC | chr16:66826675-66826698_− |
| | | 923 | GAACCGAGCTGAAGCTGCCA | chr16:66823578-66823601_− |
| | | 924 | TATGTCCTACAGATCAAAAG | chr16:66821493-66821516_+ |
| | | 925 | AGGACCACAGTCATACTCCA | chr16:66817466-66817489_− |
| NAMPT | ENST00000222553.7 | 926 | TCTGCCGCAGGATTCATCTC | chr7:106284867-106284890_+ |
| | | 927 | CATCTCGGGCCGGAGGACAG | chr7:106284881-106284904_+ |
| | | 928 | CCGCAGGATTCATCTCGGGC | chr7:106284871-106284894_+ |
| | | 929 | CCGGCCCGAGATGAATCCTG | chr7:106284871-106284894_− |
| | | 930 | GCTCACTTGGTTAACTTCAA | chr7:106268556-106268579_− |
| NCSTN | ENST00000294785.9 | 931 | TCTTTCTGCGTCCTACTAGC | chr1:160343459-160343482_+ |
| | | 932 | AGAAATACAGTGGAATTCGC | chr1:160350147-160350170_+ |
| | | 933 | TCCACACATTGTAATCAGAC | chr1:160351711-160351734_− |
| | | 934 | GGACATTAAAGCCTGACGAC | chr1:160351761-160351784_+ |
| | | 935 | CAGTGGAATTCGCTGGGCAA | chr1:160350154-160350177_+ |
| NEK11 | ENST00000383366.8 | 936 | ATTCAGGAATATAAACAAGC | chr3:131109823-131109846_+ |
| | | 937 | TTCCAGTTAAAGTTGTGGCC | chr3:131133869-131133892_− |
| | | 938 | TGGTTTATCCAGCTGCTGCT | chr3:131109877-131109900_+ |
| | | 939 | CAAGAAAGCCAAACGAGGAG | chr3:131029851-131029874_+ |
| | | 940 | CCGACTTTGTGTCATAGCCT | chr3:131133926-131133949_− |
| NOTCH1 | ENST00000277541.7 | 941 | TCCAGGTTGATCTCGCAGTT | chr9:136515375-136515398_+ |
| | | 942 | GTTGATGTTGGTCTGGCAGT | chr9:136513108-136513131_+ |
| | | 943 | CGCAGGGGTTGGAGGCGCAC | chr9:136523143-136523166_+ |
| | | 944 | TTGATGTTGGTCTGGCAGTT | chr9:136513109-136513132_+ |
| | | 945 | GGCCCGCGATGCTCCCAGCC | chr9:136544080-136544103_− |
| NOTCH2 | ENST00000256646.6 | 946 | AGTACAGTTTCCATGGATGC | chr1:119955053-119955076_+ |
| | | 947 | ATGCTCACAAGGATTGCTAT | chr1:119967598-119967621_+ |
| | | 948 | GCTACCTGTCTGGATAAGAT | chr1:119967458-119967481_− |
| | | 949 | CAGGTGCTCCCTTCAAAACC | chr1:119987063-119987086_+ |
| | | 950 | TCAGAATGGAGGGGTTTGTG | chr1:119987004-119987027_− |
| NOTCH3 | ENST00000263388.6 | 951 | CATGTCCCACCGGCCCTGCA | chr19:15185306-15185329_+ |
| | | 952 | CAAATGGCCCGGCCGTTCAC | chr19:15189334-15189357_+ |
| | | 953 | GGTCGCGGCCGGCCGCCATG | chr19:15200899-15200922_− |
| | | 954 | GCACCTGCCCAAGTGCTCGC | chr19:15189142-15189165_+ |
| | | 955 | GTGAACGTGGACGACTGTCC | chr19:15191821-15191844_− |
| NOTCH4 | ENST00000375023.3 | 956 | CAGAGGCAAAAGAAGGCTCC | chr6:32216961-32216984_+ |
| | | 957 | TCCTAGGGGCTGTTCGAATG | chr6:32221037-32221060_− |
| | | 958 | TATGGCAGGAGGTGCCTTTG | chr6:32221139-32221162_+ |
| | | 959 | CCACGTTGTGAGCTGCGGGC | chr6:32221069-32221092_− |
| | | 960 | GCACAGGTTGGGAGCACACA | chr6:32215344-32215367_+ |
| NPEPPS | ENST00000322157.8 | 961 | TGTAGACATAACAGGTGTGC | chr17:47585557-47585580_− |
| | | 962 | TCGCTCCATACAGTATAATT | chr17:47605395-47605418_− |
| | | 963 | AATACCTGGACCAAACAAAT | chr17:47596408-47596431_+ |
| | | 964 | CAGCATGGCAGAGCTGTACT | chr17:47603945-47603968_− |
| | | 965 | AGAGAAAGGTCACGAATGCC | chr17:47603980-47604003_− |
| NR3C1 | ENST00000343796.6 | 966 | CAGTGTGCTTGCTCAGGAGA | chr5:143400769-143400792_− |
| | | 967 | GACTTCTATAAAACCCTAAG | chr5:143400735-143400758_− |
| | | 968 | TTTGGAAGGAAACTCGAATG | chr5:143400109-143400132_− |
| | | 969 | TCATCGAACTCTGCACCCCT | chr5:143399969-143399992_− |
| | | 970 | TCCAAAGAATCATTAACTCC | chr5:143400810-143400833_− |
| NRAS | ENST00000369535.4 | 971 | TGAAATGACTGAGTACAAAC | chr1:114716141-114716164_− |
| | | 972 | AGAGACCAATACATGAGGAC | chr1:114713865-114713888_− |
| | | 973 | TGAATATGATCCCACCATAG | chr1:114716048-114716071_− |
| | | 974 | GATCATATTCATCTACAAAG | chr1:114716060-114716083_+ |
| | | 975 | GAGTACAAACTGGTGGTGGT | chr1:114716131-114716154_− |
| NTRK1 | ENST00000524377.5 | 976 | GTGTGCAGCTGCACACTGGC | chr1:156873634-156873657_− |
| | | 977 | GCATCCCCTTCTCTGTGGAT | chr1:156873680-156873703_+ |
| | | 978 | CTCTCCTGGAAAACTGTGCA | chr1:156866937-156866960_+ |
| | | 979 | CGGCGGTGGAGATGCACCAC | chr1:156873656-156873679_+ |
| | | 980 | CCAGCGCTGTAGCCAGCGCA | chr1:156868138-156868161_− |
| NTRK2 | ENST00000277120.7 | 981 | TTATAGAACCACTGAAGCGC | chr9:84727736-84727759_− |
| | | 982 | GGATTCTGGATTAAAATTTG | chr9:84702356-84702379_+ |
| | | 983 | CCCGCCATGGCGCGGCTCTG | chr9:84670775-84670798_+ |
| | | 984 | GAAGCCCCAGAGCCGCGCCA | chr9:84670779-84670802_− |
| | | 985 | GCCGTGGTACTCCGTGTGAT | chr9:84727809-84727832_− |
| NTRK3 | ENST00000394480.6 | 986 | CACCCCTTCCTGATGTGGAC | chr15:88136502-88136525_− |
| | | 987 | GCAAGACTGAGATCAATTGC | chr15:88256015-88256038_− |
| | | 988 | ACTGCAGCTGTGACATCCGC | chr15:88137515-88137538_− |
| | | 989 | GCCAGAAACTACACTTGGCT | chr15:88256113-88256136_+ |
| | | 990 | CTGATGTTCATGCGGAAGAG | chr15:88137411-88137434_+ |
| PARP1 | ENST00000366794.9 | 991 | GAACAACTCCTGAAGGCTCT | chr1:226380045-226380068_+ |
| | | 992 | CCACCTCAACGTCAGGGTGC | chr1:226402285-226402308_+ |
| | | 993 | ACGGAGGCGCTGGTTTCTGG | chr1:226383100-226383123_+ |
| | | 994 | GCAAGTGCCTTCTGGGGAGT | chr1:226386327-226386350_− |
| | | 995 | GTAGCTGATGGCATGGTGTT | chr1:226385645-226385668_− |
| PARP2 | ENST00000250416.9 | 996 | AACTCGTAGATGCCAGAGAC | chr14:20344998-20345021_+ |
| | | 997 | ATGGTATGCCAGGAAGGTCA | chr14:20345084-20345107_+ |
| | | 998 | ATCTACGAGTTTTCTTGGCA | chr14:20344986-20345009_− |
| | | 999 | AGCTTTGCCCTTTAACAGCA | chr14:20345405-20345428_− |
| | | 1000 | AGCAAGATGGTATGCCAGGA | chr14:20345078-20345101_+ |
| PARP3 | ENST00000431474.5 | 1001 | CATCTTCTAGCCTTGTGAAG | chr3:51944415-51944438_− |
| | | 1002 | GGACCACTTTGTGTCTCACC | chr3:51944496-51944519_+ |
| | | 1003 | TGATGAGCTTCTGCGTGGCT | chr3:51944833-51944856_− |
| | | 1004 | TGTCCACTCAGCAGCAACCC | chr3:51943508-51943531_+ |
| | | 1005 | CGATAAGTGTGTACTTGCCC | chr3:51944514-51944537_− |
| PDE5A | ENST00000264805.9 | 1006 | GAAATGCACCATTTTCATAG | chr4:119562846-119562869_− |
| | | 1007 | TCTTAGACCCATTGTTGTCA | chr4:119607100-119607123_− |
| | | 1008 | TATGCCAATTAAGAATCATA | chr4:119596527-119596550_− |
| | | 1009 | GCACGAGGACTCTGCTGCAA | chr4:119607183-119607206_+ |
| | | 1010 | CAAGGGACAAGAGCAAGATT | chr4:119607200-119607223_+ |
| PDGFRA | ENST00000257290.9 | 1011 | CGGAGATCCACTCCCGAGAC | chr4:54273592-54273615_+ |
| | | 1012 | TGCGGGCCTACCCACCTCCC | chr4:54267635-54267658_+ |
| | | 1013 | TGCCTCCTACGACAGCAGAC | chr4:54263805-54263828_+ |
| | | 1014 | GTGCCTCGGCGGCCCACACA | chr4:54261310-54261333_+ |
| | | 1015 | ATGATCACCATGGCTCAACT | chr4:54272420-54272443_+ |
| PDGFRB | ENST00000261799.8 | 1016 | CGCGCAACGTGTCGGAGACC | chr5:150132748-150132771_− |
| | | 1017 | CAGGACAGTGGGCGGTGGGT | chr5:150132829-150132852_+ |
| | | 1018 | GCATCGGAGCCGGACACTGC | chr5:150132864-150132887_− |
| | | 1019 | CTACTATGTCTACAGACTCC | chr5:150134749-150134772_− |
| | | 1020 | GTGACACTGCACGAGAAGAA | chr5:150134886-150134909_− |
| PGF | ENST00000555567.5 | 1021 | TGCTGGGAACGGCTCGTCAG | chr14:74953909-74953932_− |
| | | 1022 | CGAGCCGTTCCCAGCAGACA | chr14:74953916-74953939_+ |
| | | 1023 | TAAAGATCCGTTCTGGGGAC | chr14:74948556-74948579_− |
| | | 1024 | GGCTTCATCTTCTCCCGCAG | chr14:74946384-74946407_+ |
| | | 1025 | TCAGCTCCACGTAGGAGGGC | chr14:74948537-74948560_+ |
| PIGF | ENST00000281382.10 | 1026 | GGTCCTAACAAACATAAGCA | chr2:46612266-46612289_+ |
| | | 1027 | GGATTGGGAAAGACCATGGC | chr2:46592473-46592496_− |
| | | 1028 | CACTGGATTGGGAAAGACCA | chr2:46592477-46592500_− |
| | | 1029 | CATGGTCTTTCCCAATCCAG | chr2:46592478-46592501_+ |
| | | 1030 | AAGTTCTCCAAGAAGAGTGA | chr2:46615063-46615086_+ |
| PIK3CA | ENST00000263967.3 | 1031 | ATGCCTCCACGACCATCATC | chr3:179198825-179198848_+ |
| | | 1032 | CTTCAATCACTGACATATCT | chr3:179210483-179210506_− |
| | | 1033 | TGCACTATTTATAACCCAAA | chr3:179203706-179203729_− |
| | | 1034 | GAGTACCTTGTTCCAATCCC | chr3:179204566-179204589_+ |
| | | 1035 | GGTTAAAGATCCAGAAGTAC | chr3:179199726-179199749_+ |
| PIK3CB | ENST00000477593.5 | 1036 | CCTGCCCCATTTTATACTTG | chr3:138734752-138734775_− |
| | | 1037 | ATCGTATTTACCCACGCTAC | chr3:138712275-138712298_+ |
| | | 1038 | ACTTGTGGGATTGTCTTGGA | chr3:138742670-138742693_− |
| | | 1039 | TATAGGAGTCAATATCCATA | chr3:138755915-138755938_+ |
| | | 1040 | CACTGGGATTTATATCCAGT | chr3:138759210-138759233_− |
| PIK3CD | ENST00000377346.8 | 1041 | TACAAGGACCAGCTTAAGAC | chr1:9719959-9719982_+ |
| | | 1042 | CCGCAGGGTACCAGGCCCCC | chr1:9716007-9716030_− |
| | | 1043 | ATGGGAGGTGGTTTGGCACG | chr1:9717072-9717095_− |
| | | 1044 | ACGCAGGATGCCCCCTGGGG | chr1:9710448-9710471_+ |
| | | 1045 | GATGCGGAACGGCTGCTCCA | chr1:9717558-9717581_− |
| PIK3CG | ENST00000496166.5 | 1046 | CCTCCTCTGTGAAGGGTTTG | chr7:106868760-106868783_− |
| | | 1047 | CAGAGAGCGATTTAATATCA | chr7:106872888-106872911_− |
| | | 1048 | GATGACTGCACGGGAGTCAC | chr7:106868539-106868562_+ |
| | | 1049 | TTTAGAGTTCCATATGATCC | chr7:106874758-106874781_+ |
| | | 1050 | GGACGTCACCCACGGGTGCA | chr7:106868150-106868173_− |
| PIM3 | ENST00000360612.4 | 1051 | GCCGCTCGAACCAGTCCAGC | chr22:49961518-49961541_− |
| | | 1052 | AAGGAGCGGGTGACCGAGTG | chr22:49961338-49961361_+ |
| | | 1053 | GAAGGAGCGGGTGACCGAGT | chr22:49961337-49961360_+ |
| | | 1054 | TGAAGGAGCGGGTGACCGAG | chr22:49961336-49961359_+ |
| | | 1055 | GGTGGTGCTGCTGCGCAAGG | chr22:49961464-49961487_+ |
| PLK1 | ENST00000300093.8 | 1056 | CGTAGGTAGTATCGGGCCTC | chr16:23680125-23680148_− |
| | | 1057 | CAACCAAAGTCGAATATGAC | chr16:23680928-23680951_+ |
| | | 1058 | TGGTGTTGGAGCTCTGCCGC | chr16:23679314-23679337_+ |
| | | 1059 | AGGTGGATGTGTGGTCCATT | chr16:23681027-23681050_+ |
| | | 1060 | AAGTCGAATATGACGGGGAG | chr16:23680934-23680957_+ |
| PLK2 | ENST00000274289.7 | 1061 | GCAGTAGCGCTTCCCAGTCG | chr5:58459710-58459733_+ |
| | | 1062 | GAGTAGCTAAACCTCATCAA | chr5:58458990-58459013_− |
| | | 1063 | CAGAAGTTCGATACTACCTC | chr5:58458462-58458485_− |
| | | 1064 | AGTAGCTAAACCTCATCAAA | chr5:58458989-58459012_− |
| | | 1065 | ACTCGGGGCCGGAGATCTCG | chr5:58459746-58459769_− |
| PLK3 | ENST00000372201.4 | 1066 | AGGCCCGAAGGATGGCGGCC | chr1:44803074-44803097_− |
| | | 1067 | CTTGCACCGGGACCTCAAGT | chr1:44801728-44801751_+ |
| | | 1068 | CTGCTCCGGAGGCTCCAACC | chr1:44801901-44801924_− |
| | | 1069 | GGCTTGGCGACGCGGCTCTG | chr1:44800908-44800931_− |
| | | 1070 | CTTCAGGTCAGCCGTCTCAA | chr1:44802980-44803003_− |
| POLA1 | ENST00000379068.7 | 1071 | TCACAGTCGTCGCCGTGCAC | chrX:24693967-24693990_− |
| | | 1072 | GTCACCTAGCAGACCATCCT | chrX:24715156-24715179_− |
| | | 1073 | TGGGACCAACACATCTAGCC | chrX:24726988-24727011_+ |
| | | 1074 | TCAACTTTACACCAACTGAC | chrX:24727795-24727818_− |
| | | 1075 | GTCGCCGTGCACAGGTGCCA | chrX:24693959-24693982_− |
| PORCN | ENST00000326194.10 | 1076 | CATCCTCATCTACCTACTCA | chrX:48511463-48511486_+ |
| | | 1077 | CATGCAAGCACCGTGGCAGG | chrX:48511314-48511337_+ |
| | | 1078 | GGCGGCCTTGGACAGCTTGT | chrX:48512479-48512502_− |
| | | 1079 | CCATCCGTGGGGGTCTGCAA | chrX:48509801-48509824_+ |
| | | 1080 | AATGGCCACCTTTAGCCGCC | chrX:48509819-48509842_+ |
| PPARG | ENST00000287820.10 | 1081 | CCCATAACAGCATGGAATAG | chr3:12351574-12351597_− |
| | | 1082 | ACGACATTCAATTGCCATGA | chr3:12381408-12381431_− |
| | | 1083 | AGAGCCTTCCAACTCCCTCA | chr3:12381394-12381417_+ |
| | | 1084 | TCATGCTTGTGAAGGATGCA | chr3:12381469-12381492_+ |
| | | 1085 | AGTGAAGGGCTTGATATCAA | chr3:12379796-12379819_− |
| PPP2CA | ENST00000481195.5 | 1086 | AAAAGAATCCAACGTGCAAG | chr5:134206091-134206114_− |
| | | 1087 | AACGCATCACCATTCTTCGA | chr5:134201985-134202008_− |
| | | 1088 | ACATCGAACCTCTTGCACGT | chr5:134206083-134206106_+ |
| | | 1089 | GACCACAGCAAGTCACACAT | chr5:134200470-134200493_+ |
| | | 1090 | AGCTCACCAGCTAGTGATGG | chr5:134200333-134200356_− |
| PRKCA | ENST00000413366.7 | 1091 | AGTCGTCGGTCTTTGTCTGA | chr17:66688311-66688334_− |
| | | 1092 | TGTCCCCAGCCTCTGCGGAA | chr17:66645419-66645442_+ |
| | | 1093 | CTTGTGAACGTTCATATCGC | chr17:66645382-66645405_− |
| | | 1094 | CAACCGCTTCGCCCGCAAAG | chr17:66302901-66302924_+ |
| | | 1095 | GAGGGGGCGGATTTACCTAA | chr17:66645455-66645478_+ |
| PRKCB | ENST00000643927.1 | 1096 | GGGTCAGCCATCTTGCGCGC | chr16:23836163-23836186_− |
| | | 1097 | GTGCTCTCCTCGCCCTCGCT | chr16:23836202-23836225_− |
| | | 1098 | TGGTCCGTGCCACACAGGCT | chr16:24035459-24035482_− |
| | | 1099 | GGTCAGCCATCTTGCGCGCG | chr16:23836162-23836185_− |
| | | 1100 | CCACGTTTTGTGACCACTGT | chr16:24032181-24032204_+ |
| PRKCE | ENST00000306156.7 | 1101 | CGACTCGCGCATCGGCCAAA | chr2:45652240-45652263_+ |
| | | 1102 | TGGCGCAGCGACCAGGCTGT | chr2:45652157-45652180_− |
| | | 1103 | ATGCGGCCGAGGAAGCGGCA | chr2:45976466-45976489_+ |
| | | 1104 | GAACGGGAGCCGCCACTTCG | chr2:45652420-45652443_+ |
| | | 1105 | ACACTACCATGGTCGGGGCG | chr2:45652087-45652110_− |
| PRKCG | ENST00000263431.3 | 1106 | TTTCTGCAAAACAGGGGCCG | chr19:53882536-53882559_− |
| | | 1107 | GCGATTCAGAGGGGGGACCC | chr19:53882519-53882542_+ |
| | | 1108 | GGAGCTGCTCAAGGCGCCCG | chr19:53892613-53892636_+ |
| | | 1109 | CGGCGTAGGCGATTCAGAGG | chr19:53882511-53882534_+ |
| | | 1110 | TACGTGGATCTCATCTGCTG | chr19:53889990-53890013_− |
| PRKCI | ENST00000295797.4 | 1111 | CTCATTGCAAAGGCCCTCAA | chr3:170235264-170235287_− |
| | | 1112 | AAACTCGTCACAATTGAATG | chr3:170270519-170270542_+ |
| | | 1113 | AACTCGTCACAATTGAATGT | chr3:170270520-170270543_+ |
| | | 1114 | CACCATGAAATGGATAGATG | chr3:170235325-170235348_+ |
| | | 1115 | TTAAATTATCTTCATGAGCG | chr3:170284488-170284511_+ |
| PRKDC | ENST00000314191.6 | 1116 | CGCTTATAGAGCTGGTACAT | chr8:47912452-47912475_+ |
| | | 1117 | CTGTGAACTTTTACATAGCA | chr8:47912531-47912554_− |
| | | 1118 | AAGCCACGCAGATGCCAGAA | chr8:47912490-47912513_− |
| | | 1119 | TGTAGCACTCCAACGCGGCC | chr8:47893183-47893206_+ |
| | | 1120 | TGATGAAGAGCTATGTGGCC | chr8:47914023-47914046_− |
| PRLR | ENST00000618457.4 | 1121 | TGTCCCAGGCCTCCACCAGC | chr5:35086254-35086277_+ |
| | | 1122 | GGAAGTCCTCCATCTGTCCC | chr5:35086240-35086263_+ |
| | | 1123 | ATTATTCACTGACTTACCAC | chr5:35086212-35086235_− |
| | | 1124 | ATAAGGAAACATTCACCTGC | chr5:35086269-35086292_− |
| | | 1125 | AAACATTCACCTGCTGGTGG | chr5:35086263-35086286_− |
| PSEN1 | ENST00000324501.9 | 1126 | ATTATCTAATGGACGACCCC | chr14:73170855-73170878_+ |
| | | 1127 | AAAGAGCATGATCACATGCT | chr14:73170944-73170967_− |
| | | 1128 | GGCAGGAGCACAACGACAGA | chr14:73170812-73170835_+ |
| | | 1129 | GCTTTTATACCCGGAAGGAT | chr14:73171019-73171042_+ |
| | | 1130 | ACCCCAGGGTAACTCCCGGC | chr14:73170870-73170893_+ |
| PSENEN | ENST00000587708.6 | 1131 | CCAGGTTCATAGCTGCGCTG | chr19:35745917-35745940_− |
| | | 1132 | CTGTGCCGGAAGTACTACCT | chr19:35745969-35745992_+ |
| | | 1133 | ATGTTGACCAACCAGAGAAA | chr19:35746435-35746458_− |
| | | 1134 | GATTTGGCTCTGTTCTGTGT | chr19:35746493-35746516_− |
| | | 1135 | GTTCTGTGTAGGCTGGGACA | chr19:35746482-35746505_− |
| PSMB1 | ENST00000262193.6 | 1136 | ACAGCCATGTATTCGGCTCC | chr6:170553207-170553230_− |
| | | 1137 | GGCGAAAATCGCAGCTGCAA | chr6:170553147-170553170_+ |
| | | 1138 | TCGCAGCTGCAAAGGGCCCG | chr6:170553155-170553178_+ |
| | | 1139 | GATGGAACCGCACAGAGCCG | chr6:170553172-170553195_− |
| | | 1140 | TCTGATACTCGATTGAGTGA | chr6:170549047-170549070_− |
| PSMB10 | ENST00000358514.8 | 1141 | GTCCCGGTCTTGCGTGCGTG | chr16:67936422-67936445_+ |
| | | 1142 | ACGCGTCCTCCCGGGGCTCA | chr16:67936447-67936470_− |
| | | 1143 | TCTCGAAGGAGAAGCCCCCT | chr16:67936703-67936726_+ |
| | | 1144 | GGGCTGGCTTCAGCATCTTG | chr16:67936733-67936756_+ |
| | | 1145 | TCCCGGTCTTGCGTGCGTGA | chr16:67936423-67936446_+ |
| PSMB2 | ENST00000373237.3 | 1146 | GGAGGCGACAAGAACATAGT | chr1:35641381-35641404_+ |
| | | 1147 | AAGATATTACTCCTGTGTGT | chr1:35636380-35636403_− |
| | | 1148 | GCCACCATGGAGTACCTCAT | chr1:35641415-35641438_− |
| | | 1149 | AGGTACTCCATGGTGGCGGA | chr1:35641421-35641444_+ |
| | | 1150 | GATACCGATGAGGTACTCCA | chr1:35641411-35641434_+ |
| PSMB5 | ENST00000361611.10 | 1151 | AAAAACCCGCGCTGGTTCAC | chr14:23034825-23034848_+ |
| | | 1152 | CGCTACCGGTGAACCAGCGC | chr14:23034830-23034853_− |
| | | 1153 | TGGGACACCCCAGCCTGGCG | chr14:23034734-23034757_+ |
| | | 1154 | CAAGTCCGAAAAACCCGCGC | chr14:23034817-23034840_+ |
| | | 1155 | GCTTCATGGAACAACCACCC | chr14:23034691-23034714_− |
| PSMB8 | ENST00000374882.7 | 1156 | ATTCTTCCAGTCCCTGGGTG | chr6:32843058-32843081_− |
| | | 1157 | GATTCCGGCCGCTGCCCTCG | chr6:32843946-32843969_+ |
| | | 1158 | CCCCGGGGTAAAGCGAGCTC | chr6:32843856-32843879_+ |
| | | 1159 | ACAGAATTCTTCCAGTCCCT | chr6:32843063-32843086_− |
| | | 1160 | ATTCCGGCCGCTGCCCTCGG | chr6:32843947-32843970_+ |
| PSMB9 | ENST00000374859.2 | 1161 | CCTTGCAGGGATGCTGCGGG | chr6:32854219-32854242_+ |
| | | 1162 | CCGCCCGCAGCATCCCTGCA | chr6:32854219-32854242_− |
| | | 1163 | GCCCGGGGTAAGTCCCCGGT | chr6:32854247-32854270_− |
| | | 1164 | GTGTGGACTTCTCCCGCCCG | chr6:32854262-32854285_− |
| | | 1165 | GCGGGCGGGAGCACCAACCG | chr6:32854234-32854257_+ |
| PSMD1 | ENST00000308696.10 | 1166 | GAGGTTTTATACGAAGATGA | chr2:231062506-231062529_+ |
| | | 1167 | GGCTATAAGCTAACATTCCT | chr2:231070032-231070055_− |
| | | 1168 | AAGATGAAGGTTTCCGGAGT | chr2:231062519-231062542_+ |
| | | 1169 | AGGCTGCAAACTGCCGACTC | chr2:231062532-231062555_− |
| | | 1170 | CAATGATAACTCTGAATATG | chr2:231062640-231062663_+ |
| PSMD2 | ENST00000310118.8 | 1171 | GGACGAGAAGCCGAGCGGCA | chr3:184299337-184299360_+ |
| | | 1172 | ATGCCAATCTCAGAGCTTCA | chr3:184302450-184302473_− |
| | | 1173 | CTTCTCGTCCGTGCCGCCGG | chr3:184299324-184299347_− |
| | | 1174 | GTATCGGCTAGTGGGCTCCC | chr3:184301601-184301624_+ |
| | | 1175 | GCTTCTCGTCCGTGCCGCCG | chr3:184299325-184299348_− |
| PTCH1 | ENST00000331920.10 | 1176 | CAGAGACTCTTATTTAAACT | chr9:95506528-95506551_− |
| | | 1177 | GCCTCCAGCCGGCCGTCCCG | chr9:95508271-95508294_+ |
| | | 1178 | ATTCTGTCCTGTTTCACTGA | chr9:95476776-95476799_+ |
| | | 1179 | TATCACAGAAACAGGTTACA | chr9:95482138-95482161_− |
| | | 1180 | CTGGCAGGAGGAGTTGATTG | chr9:95480005-95480028_− |
| PTGS2 | ENST00000367468.9 | 1181 | GGGTACAATCGCACTTATAC | chr1:186679354-186679377_+ |
| | | 1182 | TTTCTCCATAGAATCCTGTC | chr1:186679333-186679356_+ |
| | | 1183 | TTCTCCATAGAATCCTGTCC | chr1:186679334-186679357_+ |
| | | 1184 | CCGACTCCCTTGGGTGTCAA | chr1:186678259-186678282_− |
| | | 1185 | CCATAGTCAGCATTGTAAGT | chr1:186678355-186678378_+ |
| PTK2 | ENST00000522684.5 | 1186 | GAATGCTTCAAGTGTGCTCT | chr8:140818880-140818903_− |
| | | 1187 | ATTTGGTGTGTGATTCAAGT | chr8:140890692-140890715_+ |
| | | 1188 | GGGTACTGCCGGCTGGTGAA | chr8:140800493-140800516_− |
| | | 1189 | CAAATCTGTAGACTGGAGAC | chr8:140818908-140818931_+ |
| | | 1190 | GGCGATCATACTGGGAGATG | chr8:140846300-140846323_− |
| PTK6 | ENST00000542869.2 | 1191 | CCGCCTCGTTCAGGTGCAGC | chr20:63534240-63534263_+ |
| | | 1192 | AAGATCTGGCGGCGTGCCGG | chr20:63534263-63534286_− |
| | | 1193 | TCCCGGGACACCATGGCGGG | chr20:63537300-63537323_+ |
| | | 1194 | CCGACGCACAGCTTCCGAGC | chr20:63535016-63535039_+ |
| | | 1195 | GGGCCGGCTGCACCTGAACG | chr20:63534243-63534266_− |
| RAC1 | ENST00000356142.4 | 1196 | CGGTAAGGATATAACCTCCC | chr7:6398675-6398698_+ |
| | | 1197 | ACGGTAAGGATATAACCTCC | chr7:6398674-6398697_+ |
| | | 1198 | CGGCTTGTCTTTGCCCCGGG | chr7:6398689-6398712_− |
| | | 1199 | GGTAAGGATATAACCTCCCG | chr7:6398676-6398699_+ |
| | | 1200 | AATCGGCTTGTCTTTGCCCC | chr7:6398692-6398715_− |
| RAD50 | ENST00000378823.7 | 1201 | GATGAATTAACCTCACTGTT | chr5:132591921-132591944_+ |
| | | 1202 | TGATGAATTAACCTCACTGT | chr5:132591920-132591943_+ |
| | | 1203 | TCTAATTGGCCTTTAAGTGA | chr5:132579434-132579457_+ |
| | | 1204 | TTGCTTCTTTCGGCTATCCA | chr5:132587625-132587648_− |
| | | 1205 | AAACGTTTGCAAACATGTCC | chr5:132557310-132557333_+ |
| RAF1 | ENST00000251849.8 | 1206 | TGGAGCACATACAGGGAGCT | chr3:12618697-12618720_− |
| | | 1207 | GCAGTTTGGCTATCAGCGCC | chr3:12618597-12618620_− |
| | | 1208 | GGATGTCGACCTCTGCCTCT | chr3:12604192-12604215_+ |
| | | 1209 | GTATGCGAGAGTCTGTTTCC | chr3:12606211-12606234_− |
| | | 1210 | GTGTTAAAGGTGAAGGCGTG | chr3:12604244-12604267_+ |
| RARA | ENST00000254066.9 | 1211 | CGGGCACCTCAATGGGTACC | chr17:40331256-40331279_+ |
| | | 1212 | GGGGAGAGTCCACCCAGCAT | chr17:40331305-40331328_− |
| | | 1213 | GCAGCTCCTGCCCGACACCT | chr17:40331231-40331254_+ |
| | | 1214 | GGGGGGAAGAAGAAGGCGTA | chr17:40331284-40331307_− |
| | | 1215 | AAAGCAAGGCTTGTAGATGC | chr17:40348381-40348404_− |
| RARB | ENST00000330688.8 | 1216 | GACTCGCAGTGTAGAAATCC | chr3:25428775-25428798_− |
| | | 1217 | GCTCTCAAAGCATGCTTCAG | chr3:25428824-25428847_+ |
| | | 1218 | CAAACCCTGCTTCGTCTGCC | chr3:25461268-25461291_+ |
| | | 1219 | AGCTTTCTCCTGGAGCATGC | chr3:25428804-25428827_− |
| | | 1220 | TTGTCCTGGCAGACGAAGCA | chr3:25461272-25461295_− |
| RARG | ENST00000425354.6 | 1221 | CCTTCCCAGGGGCACTCAGG | chr12:53227440-53227463_− |
| | | 1222 | TTGTCATTGCACACGAAGCA | chr12:53215691-53215714_+ |
| | | 1223 | GCCTTCCCAGGGGCACTCAG | chr12:53227441-53227464_− |
| | | 1224 | CTAGGGCTCAGCATCTCGAA | chr12:53227411-53227434_+ |
| | | 1225 | AAGCATGGCTTGTAGACCCG | chr12:53215706-53215729_+ |
| RET | ENST00000355710.7 | 1226 | TGCAGTCAGCAAGAGACGGC | chr10:43112132-43112155_+ |
| | | 1227 | AAGTATACGCGGGCACAGCC | chr10:43102421-43102444_− |
| | | 1228 | AGCAGAGCTCCCGGGGCTTG | chr10:43102480-43102503_− |
| | | 1229 | GACGTACAGCAAGGGCGTGC | chr10:43100521-43100544_− |
| | | 1230 | AGGCCAACGGCAGCTTCGTG | chr10:43106529-43106552_+ |
| RICTOR | ENST00000357387.7 | 1231 | AAATAATTATCCATGAGGTC | chr5:38967203-38967226_+ |
| | | 1232 | TCCTCTACCTGTTGTGACTG | chr5:38967969-38967992_− |
| | | 1233 | CGGCGAGGAGAACGTCCCGC | chr5:39074122-39074145_− |
| | | 1234 | CCCGTCAATATGGCGGCGAT | chr5:39074363-39074386_− |
| | | 1235 | GACAGTTGGAGGCTTTCAGA | chr5:38967387-38967410_− |
| ROCK1 | ENST00000399799.2 | 1236 | TGCAGAAGTAGTTCTTGCAT | chr18:21045322-21045345_− |
| | | 1237 | TGTAGAGATAACGATCATCT | chr18:21045430-21045453_+ |
| | | 1238 | TTTGTGCCTTCCTTACTGAC | chr18:21042095-21042118_− |
| | | 1239 | GAATGTGACTGGTGGTCGGT | chr18:21042590-21042613_− |
| | | 1240 | TTGGATGCAATCCATTCCAT | chr18:21045303-21045326_− |
| ROCK2 | ENST00000315872.10 | 1241 | TTTTGGCACGTGTATGAAGA | chr2:11235706-11235729_− |
| | | 1242 | GAAGCCTGACAACATGCTCT | chr2:11235757-11235780_− |
| | | 1243 | AATCAGAGGTCTACAGATGA | chr2:11286597-11286620_− |
| | | 1244 | TCCACGTTGATGGGGGAGCG | chr2:11344005-11344028_+ |
| | | 1245 | CGCCCCCGAGACCGCGCCGG | chr2:11344078-11344101_− |
| ROS1 | ENST00000368508.7 | 1246 | GCTGGGTCACTTTCTCTACT | chr6:117385699-117385722_− |
| | | 1247 | GTCCTGTAACTGGGACTTGG | chr6:117403152-117403175_+ |
| | | 1248 | CCCTGGTCAGAGCCCTCAGT | chr6:117387796-117387819_− |
| | | 1249 | GTAGATAGTATTTGGTAAAG | chr6:117396916-117396939_+ |
| | | 1250 | CAGCAAAGGGGATGCGAGGT | chr6:117389616-117389639_+ |
| RPL3 | ENST00000216146.8 | 1251 | ATCACGCCATCAAATCCCGC | chr22:39319595-39319618_+ |
| | | 1252 | CCACCGAGGCCTGCGCAAGG | chr22:39314780-39314803_− |
| | | 1253 | ACAGAGAAGGCTACACGAGC | chr22:39314737-39314760_+ |
| | | 1254 | CATGGGTGGTGTCTCTACAA | chr22:39317573-39317596_+ |
| | | 1255 | TGAGATGATCGACGTCATCG | chr22:39315392-39315415_− |
| RPS6KB1 | ENST00000225577.8 | 1256 | CATGAGGCGACGAAGGAGGC | chr17:59893183-59893206_+ |
| | | 1257 | TAAATGAAAGCATGGACCAT | chr17:59910568-59910591_+ |
| | | 1258 | GCGGCGGGTCCGGGCCCATG | chr17:59893167-59893190_+ |
| | | 1259 | AAGTAACAGGAGCAAATACT | chr17:59914650-59914673_+ |
| | | 1260 | AGGCGACGAAGGAGGCGGGA | chr17:59893187-59893210_+ |
| RPTOR | ENST00000306801.7 | 1261 | AGGCACTGTGAGAAAATTGA | chr17:80545728-80545751_+ |
| | | 1262 | ATAGGTCAGCCGGGAGGTCG | chr17:80754119-80754142_− |
| | | 1263 | CTTCTGTAAATTTGCACCGA | chr17:80643763-80643786_− |
| | | 1264 | GGGGATCATGGGCAGCAGCT | chr17:80754100-80754123_− |
| | | 1265 | GATGGGTCCTCAGAAAGCTC | chr17:80643737-80643760_+ |
| RRM1 | ENST00000300738.9 | 1266 | GTGAGTTGTATTCGGGCTAC | chr11:4118422-4118445_+ |
| | | 1267 | AATGTTGACTTGGCCACCAT | chr11:4107487-4107510_− |
| | | 1268 | CAATGTTGACTTGGCCACCA | chr11:4107488-4107511_− |
| | | 1269 | ACAGCTCGATATGTGGATCA | chr11:4119895-4119918_+ |
| | | 1270 | CTCGATATGTGGATCAAGGT | chr11:4119899-4119922_+ |
| RXRA | ENST00000481739.1 | 1271 | CAGGGACGGGTGCAGCGAGG | chr9:134401691-134401714_− |
| | | 1272 | GGAGCCGATGCCAGGCCCCA | chr9:134401709-134401732_− |
| | | 1273 | CCTCGCTGCACCCGTCCCTG | chr9:134401694-134401717_+ |
| | | 1274 | AGGAAGCCATGTTTCCTGAG | chr9:134408234-134408257_− |
| | | 1275 | TGGCGCCCACCCCTGCGCTG | chr9:134429207-134429230_− |
| RXRB | ENST00000374680.3 | 1276 | ATTTCTTTTCGCACCCCCAC | chr6:33200393-33200416_+ |
| | | 1277 | CCCATGGAAGAACTGATGAC | chr6:33199229-33199252_+ |
| | | 1278 | AGGCCCCGGACCCCTAAGAC | chr6:33198381-33198404_+ |
| | | 1279 | CTCCCCTGGCTCCGGCTCCG | chr6:33200275-33200298_+ |
| | | 1280 | CCTGGCCACTGGCATGAAGA | chr6:33197764-33197787_− |
| RXRG | ENST00000359842.9 | 1281 | TTTCCAATCCCGGGAAGCCC | chr1:165419943-165419966_+ |
| | | 1282 | CTGCAAGTGCTCCTGAGGGT | chr1:165428759-165428782_+ |
| | | 1283 | CTGTGGACAAGGCTGCTGAT | chr1:165428909-165428932_+ |
| | | 1284 | CCCTCTTCATGCCCATGACA | chr1:165417043-165417066_+ |
| | | 1285 | GAGAGCCCAGGGCATTGAGG | chr1:165428810-165428833_+ |
| S1PR1 | ENST00000305352.6 | 1286 | CAATAAAATAGTACATGGGT | chr1:101239214-101239237_− |
| | | 1287 | TAAAATAGTACATGGGTCGG | chr1:101239211-101239234_− |
| | | 1288 | CGTCCGGCATTACAACTACA | chr1:101239058-101239081_+ |
| | | 1289 | GTCCGGCATTACAACTACAC | chr1:101239059-101239082_+ |
| | | 1290 | TTGCCAATAAAATAGTACAT | chr1:101239218-101239241_− |
| SH2B3 | ENST00000341259.6 | 1291 | GCTCCAGCATCCAGGAGGTC | chr12:111446780-111446803_+ |
| | | 1292 | CTCGGCCGGGGAGCTGCCAG | chr12:111418591-111418614_+ |
| | | 1293 | GTGTCCCGGTAGTCGCGGCC | chr12:111418397-111418420_− |
| | | 1294 | CTGGCAGCTCCCCGGCCGAG | chr12:111418588-111418611_− |
| | | 1295 | CTGTGAGTTGCACGCCGTAG | chr12:111418231-111418254_+ |
| SHH | ENST00000297261.6 | 1296 | AAGAAAACACCGGAGCGGAC | chr7:155811834-155811857_− |
| | | 1297 | AGACCCTAGGCGCCAGCGGA | chr7:155811939-155811962_− |
| | | 1298 | GGTGAGTTCCTTAAATCGCT | chr7:155811891-155811914_+ |
| | | 1299 | GTATGCTCGGGACTGGCGTG | chr7:155812048-155812071_− |
| | | 1300 | GGATGAAGAAAACACCGGAG | chr7:155811839-155811862_− |
| SIK1 | ENST00000270162.7 | 1301 | TGGCGGGGGCCTGGCACACC | chr21:43417666-43417689_+ |
| | | 1302 | GTGCCAGGCCCCCGCCAGCC | chr21:43417660-43417683_− |
| | | 1303 | CAGGAGAGCCTCTGTCCACG | chr21:43421317-43421340_− |
| | | 1304 | CCCCTCAAAGACTTCCGGGG | chr21:43421275-43421298_+ |
| | | 1305 | AGTCGTCTCCCCCTCCACCA | chr21:43418514-43418537_− |
| SIRT1 | ENST00000212015.10 | 1306 | CGCAAGAGGCCGCGGAGAGA | chr10:67884820-67884843_+ |
| | | 1307 | TGTCGGCCCCCGCCGCCGAG | chr10:67884762-67884785_− |
| | | 1308 | CACATGCAAGCTCTAGTGAC | chr10:67887491-67887514_+ |
| | | 1309 | GGCCGCGTCGTCCCCCGCCG | chr10:67884789-67884812_+ |
| | | 1310 | TGGGGCGGCCCCAGAGCGTG | chr10:67884876-67884899_+ |
| SLAMF7 | ENST00000368043.7 | 1311 | GAACCAGCCATATTGCTCTC | chr1:160739289-160739312_− |
| | | 1312 | GCTGGTCGGTTCCGTTGGTG | chr1:160748221-160748244_+ |
| | | 1313 | TATATCCTTTGGCAGCTCAC | chr1:160739334-160739357_+ |
| | | 1314 | CTTCCAGAGAGCAATATGGC | chr1:160739286-160739309_+ |
| | | 1315 | GCTTTACTTTGGACTTCAGG | chr1:160748254-160748277_− |
| SLC2A2 | ENST00000314251.7 | 1316 | CTCAACTAATCACCATGCTC | chr3:171014548-171014571_− |
| | | 1317 | GGCCTGGTTCCTATGTATAT | chr3:171007229-171007252_− |
| | | 1318 | CAGTCTCTTCCTCAGCCCAA | chr3:171014580-171014603_+ |
| | | 1319 | GTTCATTGAGTATGAGATTG | chr3:171014614-171014637_+ |
| | | 1320 | CTGCAAAGCTGGATACAGAC | chr3:171014523-171014546_+ |
| SMO | ENST00000249373.7 | 1321 | GCCCCTGTGCCATCGTGGAG | chr7:129203506-129203529_+ |
| | | 1322 | CCGCTGCCCGCCCAGCGCGG | chr7:129189155-129189178_+ |
| | | 1323 | TGGCTGGCCCAGTTCATGGA | chr7:129205702-129205725_+ |
| | | 1324 | CCCCTGTGCCATCGTGGAGA | chr7:129203507-129203530_+ |
| | | 1325 | AGCAGCGGGGGGCATTCCGG | chr7:129203384-129203407_− |
| SRC | ENST00000373578.6 | 1326 | CGTCACCTCCCCGCAGAGGG | chr20:37384368-37384391_+ |
| | | 1327 | GGCGCCCTCCGACTCCATCC | chr20:37393963-37393986_+ |
| | | 1328 | CAGCGGGCCCGCCCTCTGCG | chr20:37384376-37384399_− |
| | | 1329 | CTGGCCCACTCGCTCAGCAC | chr20:37393910-37393933_+ |
| | | 1330 | TCCTAGACTCATAGTCATAG | chr20:37386096-37386119_− |
| SSTR2 | ENST00000357585.3 | 1331 | TTGACACCACAGAGCCATTG | chr17:73169378-73169401_− |
| | | 1332 | TTGCTTGTCAGGTCATAGTA | chr17:73169424-73169447_− |
| | | 1333 | ATTTGACCTCAATGGCTCTG | chr17:73169372-73169395_+ |
| | | 1334 | CACTCAATGGAAGCCACACA | chr17:73169338-73169361_+ |
| | | 1335 | AAAAGCAGCCATGGACATGG | chr17:73169309-73169332_+ |
| SSTR5 | ENST00000293897.5 | 1336 | GCTGGAACGCCTCCTCCCCG | chr16:1078899-1078922_+ |
| | | 1337 | GCCTCCAGAGGCAGCCCCCG | chr16:1078914-1078937_− |
| | | 1338 | AGGCGGTGACAACAGGACGC | chr16:1078933-1078956_+ |
| | | 1339 | GCTGTACCTGCTGGTGTGTG | chr16:1079002-1079025_+ |
| | | 1340 | CTGGAACGCCTCCTCCCCGG | chr16:1078900-1078923_+ |
| STAT3 | ENST00000264657.9 | 1341 | CTGCTGTAGCTGATTCCATT | chr17:42348489-42348512_+ |
| | | 1342 | GAAACTGCCGCAGCTCCATT | chr17:42348416-42348439_+ |
| | | 1343 | AGCCGATCTAGGCAGATGTT | chr17:42337443-42337466_+ |
| | | 1344 | TCCAGTTCACTACTAAAGTC | chr17:42333671-42333694_− |
| | | 1345 | GACCCCTGATTTTAGCAGGA | chr17:42348512-42348535_− |
| SYK | ENST00000375754.8 | 1346 | CCCTTCGTGCAGCAGGCACA | chr9:90862237-90862260_− |
| | | 1347 | AGCCGTTGTTGTCTCTGGCT | chr9:90862208-90862231_− |
| | | 1348 | GCCATGCTTCAGGGGCCGGA | chr9:90843880-90843903_− |
| | | 1349 | CAGAAGATTACCTGGTCCAG | chr9:90843971-90843994_+ |
| | | 1350 | GGTTCCATGGAAAAATCTCT | chr9:90845518-90845541_+ |
| TBK1 | ENST00000331710.9 | 1351 | ATGTCTCCACTCCAGTCAAT | chr12:64480075-64480098_− |
| | | 1352 | CAAATTATTTGCTATTGAAG | chr12:64460304-64460327_+ |
| | | 1353 | CGACGCTTAGTCTTAGAACC | chr12:64484378-64484401_+ |
| | | 1354 | ATCAAGAACTTATCTACGAA | chr12:64484355-64484378_+ |
| | | 1355 | ATGCGTGTTATAGGGGAAGA | chr12:64466965-64466988_+ |
| TEK | ENST00000380036.8 | 1356 | AGGGGGGAGGATCCGGTGGA | chr9:27185530-27185553_− |
| | | 1357 | TCTTCACCTCGGCCTTCACC | chr9:27169593-27169616_+ |
| | | 1358 | ACAGTCATAGTTAAAGTAGC | chr9:27168505-27168528_− |
| | | 1359 | ATGCTGGAGTGTACTCGGCC | chr9:27169554-27169577_+ |
| | | 1360 | CTGGAGAGCAGAGACATCCT | chr9:27180315-27180338_− |
| TERT | ENST00000310581.9 | 1361 | CGAAGAAGCCACCTCTTTGG | chr5:1294026-1294049_− |
| | | 1362 | CCCGCGCCTCCTCGCACCCG | chr5:1294210-1294233_+ |
| | | 1363 | CTGGCGGCTGGTGCAGCGCG | chr5:1294862-1294885_− |
| | | 1364 | AGCAGCCGGTGTCTGTGCCC | chr5:1293600-1293623_− |
| | | 1365 | GGTCCACTAGCGTGTGGCGG | chr5:1294307-1294330_+ |
| TGFB1 | ENST00000221930.5 | 1366 | TGGATAGTCCCGCGGCCGGC | chr19:41352950-41352973_+ |
| | | 1367 | TGGTTATCTTTTGATGTCAC | chr19:41344775-41344798_− |
| | | 1368 | TCACCGGAGTTGTGCGGCAG | chr19:41344759-41344782_− |
| | | 1369 | TACTGGTGCTGACGCCTGGC | chr19:41352969-41352992_− |
| | | 1370 | CAACCACTGCCGCACAACTC | chr19:41344756-41344779_+ |
| TGFBR1 | ENST00000374994.8 | 1371 | GTTACGTCATGAAAACATCC | chr9:99138042-99138065_+ |
| | | 1372 | CCTCTTCATTTGGCACTCGA | chr9:99132629-99132652_− |
| | | 1373 | GTTTGGAGAGGAAAGTGGCG | chr9:99137938-99137961_+ |
| | | 1374 | TGTCTGCTGCTATAAATCCC | chr9:99138060-99138083_− |
| | | 1375 | TTACGTCATGAAAACATCCT | chr9:99138043-99138066_+ |
| TLR5 | ENST00000642603.1 | 1376 | CGGCCATCAAAGGAGCAGGA | chr1:223112945-223112968_+ |
| | | 1377 | ATGAGCTCGAGCCCCTACAA | chr1:223112446-223112469_− |
| | | 1378 | CCTCCTTGTCAATAGTCAAG | chr1:223112763-223112786_+ |
| | | 1379 | CTCCTTGTCAATAGTCAAGG | chr1:223112764-223112787_+ |
| | | 1380 | TATACAAGCTATTAGCTGCG | chr1:223112403-223112426_+ |
| TLR7 | ENST00000380659.3 | 1381 | ATGTTCTTAAACCATCTTGG | chrX:12886423-12886446_− |
| | | 1382 | ACATCCAGAGTGACATCACA | chrX:12885610-12885633_− |
| | | 1383 | CAGTCTGTGAAAGGACGCTG | chrX:12885749-12885772_− |
| | | 1384 | CAGCTACTAGAGATACCGCA | chrX:12885919-12885942_+ |
| | | 1385 | ACTGTGTACCTATTCCACTG | chrX:12885803-12885826_+ |
| TLR8 | ENST00000311912.5 | 1386 | CAAAATAGCTCCTGCAGCCT | chrX:12910403-12910426_+ |
| | | 1387 | ATTGAAGCACCACCATCACA | chrX:12919844-12919867_− |
| | | 1388 | AAAGACTCTGGCAAACCAGA | chrX:12919460-12919483_− |
| | | 1389 | ACAAGGCACGCATGGAAATG | chrX:12919827-12919850_− |
| | | 1390 | AAGTCAAGTATTTCTAAGCG | chrX:12920048-12920071_− |
| TNF | ENST00000449264.2 | 1391 | TGGAGTGATCGGCCCCCAGA | chr6:31575899-31575922_+ |
| | | 1392 | GCTCATGGTGTCCTTTCCAG | chr6:31575724-31575747_− |
| | | 1393 | AAGCACCGCCTGGAGCCCTG | chr6:31575810-31575833_− |
| | | 1394 | TTGGAGTGATCGGCCCCCAG | chr6:31575898-31575921_+ |
| | | 1395 | TGGGCTACAGGCTTGTCACT | chr6:31576783-31576806_− |
| TNFRSF8 | ENST00000263932.6 | 1396 | TAGAAGCAGCTTCCTGGGCG | chr1:12110124-12110147_− |
| | | 1397 | ACTACTATGACAAGGCTGTC | chr1:12084503-12084526_+ |
| | | 1398 | GCCTCATCCAGGTAGTAGTC | chr1:12097159-12097182_− |
| | | 1399 | CCAGCACCATGCCTGTAAGA | chr1:12110093-12110116_+ |
| | | 1400 | TCTGTGAGCCGGCTTCCCCA | chr1:12109586-12109609_+ |
| TNFSF11 | ENST00000398795.6 | 1401 | CTGCGTGGCTCGGAGGAGAT | chr13:42574336-42574359_+ |
| | | 1402 | GGCCACGAACATGGAGCGGG | chr13:42574433-42574456_− |
| | | 1403 | CCTAATAGAATATCAGAAGA | chr13:42581131-42581154_+ |
| | | 1404 | AATTAATACCTGATTCATGT | chr13:42581234-42581257_+ |
| | | 1405 | GACTACACCAAGTACCTGCG | chr13:42574321-42574344_+ |
| TNFSF13B | ENST00000375887.8 | 1406 | GCTTTCCGTCTTTGGAGGAT | chr13:108270011-108270034_− |
| | | 1407 | GAAGCTCCAGCTGTCACCGC | chr13:108270204-108270227_+ |
| | | 1408 | TCTTTGGAGGATCGGACAGA | chr13:108270003-108270026_− |
| | | 1409 | TGTTTCTTCTGGACCCTGAA | chr13:108270400-108270423_− |
| | | 1410 | GTCTTTGGAGGATCGGACAG | chr13:108270004-108270027_− |
| TNKS | ENST00000310430.10 | 1411 | CAGCGCTAGGCCGTGCCGCG | chr8:9556111-9556134_− |
| | | 1412 | CCCTTCGCCTCCCCGCGGCA | chr8:9556101-9556124_+ |
| | | 1413 | ACGGCCTAGCGCTGCCGGAG | chr8:9556120-9556143_+ |
| | | 1414 | GTAACTCAGCAGGAGGCGGC | chr8:9720440-9720463_− |
| | | 1415 | TCCCGACTGCCATCCCCCTC | chr8:9556134-9556157_− |
| TOP1 | ENST00000361337.2 | 1416 | CCCACTCATGTCGGCCCGGA | chr20:41029053-41029076_− |
| | | 1417 | GGTCCCCACTCATGTCGGCC | chr20:41029057-41029080_− |
| | | 1418 | TAGCTACTTCCTCTGCTTTG | chr20:41097238-41097261_− |
| | | 1419 | CCCCACTCATGTCGGCCCGG | chr20:41029054-41029077_− |
| | | 1420 | GAAGAAGAGCGCTATCCTGA | chr20:41092475-41092498_+ |
| TOP1MT | ENST00000329245.8 | 1421 | GGGCTCGCGCAGGACGCAGA | chr8:143334752-143334775_− |
| | | 1422 | CGATAACACCGTCACGTGGC | chr8:143324552-143324575_− |
| | | 1423 | CGTGGCGACCATCCCAAGAT | chr8:143325396-143325419_− |
| | | 1424 | GCCGGCGGGGCACCAGTGGA | chr8:143324585-143324608_− |
| | | 1425 | CCACGGCCACGGAACAAGCC | chr8:143325414-143325437_+ |
| TOP2A | ENST00000423485.5 | 1426 | GATAATGATTATGACAGATC | chr17:40407547-40407570_− |
| | | 1427 | CTCCGCCCAGACACCTACAT | chr17:40416761-40416784_− |
| | | 1428 | CAGAACCAATGTAGGTGTCT | chr17:40416756-40416779_+ |
| | | 1429 | TTTGGGCACCAGCACATCAA | chr17:40406469-40406492_− |
| | | 1430 | AGACACCTACATTGGTTCTG | chr17:40416753-40416776_− |
| TOP2B | ENST00000435706.6 | 1431 | CGGCGTGGGCGGCGGCAACG | chr3:25664242-25664265_− |
| | | 1432 | CGGAGACAGCGTAGGCTACA | chr3:25626781-25626804_− |
| | | 1433 | CATAATCTTTCCATAGCGTA | chr3:25630043-25630066_+ |
| | | 1434 | CATGTAGCCTACGCTGTCTC | chr3:25626782-25626805_+ |
| | | 1435 | GATTTGGCTGGTTCGTGTAG | chr3:25635969-25635992_− |
| TUBA1A | ENST00000301071.11 | 1436 | TGCCTGTGATAAGTTGCTCA | chr12:49186398-49186421_+ |
| | | 1437 | CACCTTCTTCAGTGAGACGG | chr12:49186664-49186687_− |
| | | 1438 | ACACCTTCTTCAGTGAGACG | chr12:49186665-49186688_− |
| | | 1439 | CACCCTGAGCAACTTATCAC | chr12:49186400-49186423_− |
| | | 1440 | GGAGATCATTGACCTCGTGT | chr12:49186326-49186349_− |
| TUBA4A | ENST00000248437.8 | 1441 | GAGCTCTATTGCTTGGAACA | chr2:219252147-219252170_− |
| | | 1442 | CAGATCCACAAAAACTGCCC | chr2:219252023-219252046_+ |
| | | 1443 | GTGCTGGAAAACACGTACCC | chr2:219252041-219252064_− |
| | | 1444 | CTGCTGGGAGCTCTATTGCT | chr2:219252154-219252177_− |
| | | 1445 | ACCCAGAGCAGCTCATCACT | chr2:219251654-219251677_− |
| TUBB | ENST00000327892.12 | 1446 | ATATGTTCCTCGTGCCATCC | chr6:30722924-30722947_+ |
| | | 1447 | CATTGTAGTACACAGAGATG | chr6:30722613-30722636_− |
| | | 1448 | TGTTCCTCGTGCCATCCTGG | chr6:30722927-30722950_+ |
| | | 1449 | AGGTTCTAGATCCACCAGGA | chr6:30722938-30722961_− |
| | | 1450 | AGATCCACCAGGATGGCACG | chr6:30722931-30722954_− |
| TUBB1 | ENST00000217133.1 | 1451 | CGAATGCTGTCCATCGTCCC | chr20:59023530-59023553_− |
| | | 1452 | GACTTGGCTGGGAGCGACCG | chr20:59022877-59022900_+ |
| | | 1453 | GGACCTAGAACCTGGGACGA | chr20:59023520-59023543_+ |
| | | 1454 | GCTGCAAGGCCGAGGCCCCG | chr20:59022894-59022917_− |
| | | 1455 | GCTGATTCTCTCCAGCTGCA | chr20:59022908-59022931_− |
| TUBB3 | ENST00000315491.11 | 1456 | TACTGGGCGCGTCTGGCGGG | chr16:89923379-89923402_− |
| | | 1457 | ATTCTGGTGGACCTGGAACC | chr16:89933490-89933513_+ |
| | | 1458 | AGGCCTGAAGAGATGTCCAA | chr16:89933539-89933562_− |
| | | 1459 | GATGTCCAAAGGCCCCTGAG | chr16:89933528-89933551_− |
| | | 1460 | CCATGGACAGTGTCCGCTCA | chr16:89933515-89933538_+ |
| TUBD1 | ENST00000325752.7 | 1461 | TAGTGACTCACACAGTTCCC | chr17:59890908-59890931_− |
| | | 1462 | CATCATAATGAGTATGGCTG | chr17:59880997-59881020_− |
| | | 1463 | TCATCATAATGAGTATGGCT | chr17:59880998-59881021_− |
| | | 1464 | ATATTTCCATTGGCCAGACT | chr17:59886138-59886161_+ |
| | | 1465 | TCAATTGTAACAGTGCAACT | chr17:59890976-59890999_− |
| TUBE1 | ENST00000368662.9 | 1466 | TACGACCACCGACTGGGTCA | chr6:112087413-112087436_+ |
| | | 1467 | GACCACCGACTGGGTCATGG | chr6:112087416-112087439_+ |
| | | 1468 | GCGCACCACCATGACCCAGT | chr6:112087421-112087444_− |
| | | 1469 | GACACGAGATAATGAAGTTG | chr6:112074760-112074783_+ |
| | | 1470 | CATTAGCAAAATCGACCTCA | chr6:112076075-112076098_− |
| TUBG1 | ENST00000251413.7 | 1471 | GCCGCACTGGCCCAACTGTA | chr17:42609756-42609779_− |
| | | 1472 | TCTTAGAACGGCTGAATGAC | chr17:42612484-42612507_+ |
| | | 1473 | TGTCATTCAGCCGTTCTAAG | chr17:42612482-42612505_− |
| | | 1474 | TGCCGCACTGGCCCAACTGT | chr17:42609757-42609780_− |
| | | 1475 | CGGCATCGCTCCTCAGGCAC | chr17:42609720-42609743_− |
| TXN | ENST00000374517.5 | 1476 | TACTTCAAGGAATATCACGT | chr9:110250837-110250860_+ |
| | | 1477 | TTTATCACCTGCAGCGTCCA | chr9:110251423-110251446_+ |
| | | 1478 | TCAGACTCCAGCAGCCAAGA | chr9:110256431-110256454_− |
| | | 1479 | TTTGCAAGGCCCACACCACG | chr9:110251378-110251401_+ |
| | | 1480 | TAGTTGACTTCTCAGCCACG | chr9:110251393-110251416_− |
| TYK2 | ENST00000525621.5 | 1481 | TCTCCGCCATGGCATCCCCC | chr19:10366438-10366461_− |
| | | 1482 | CGAAGGACAGCGCCGCAGCC | chr19:10364731-10364754_+ |
| | | 1483 | CCCCAGCGTTCGGGAACTTG | chr19:10362341-10362364_− |
| | | 1484 | GGGCTGGGCTCCATCCCCAA | chr19:10378343-10378366_+ |
| | | 1485 | CTCTGGGGATCTCTAGGATG | chr19:10368325-10368348_+ |
| TYMS | ENST00000323274.14 | 1486 | AGCCGGCCACAGGCATGGCG | chr18:657735-657758_− |
| | | 1487 | CTTCCAGTGGAGGCATTTTG | chr18:662273-662296_+ |
| | | 1488 | CTGCCCCAAAATGCCTCCAC | chr18:662276-662299_− |
| | | 1489 | CACGTTTGGTTGTCAGCAGA | chr18:659647-659670_− |
| | | 1490 | CGGCCACAGGCATGGCGCGG | chr18:657732-657755_− |
| VDR | ENST00000395324.6 | 1491 | GGAACGTGCCCCGGATCTGT | chr12:47879038-47879061_− |
| | | 1492 | CCCCGGATCTGTGGGGTGTG | chr12:47879030-47879053_− |
| | | 1493 | CTGACCCTGGAGACTTTGAC | chr12:47879059-47879082_− |
| | | 1494 | CAGGCGAAGCATGAAGCGGA | chr12:47865157-47865180_− |
| | | 1495 | ACTTTGACCGGAACGTGCCC | chr12:47879047-47879070_− |
| VEGFA | ENST00000372055.8 | 1496 | GAGAAGTGCTAGCTCGGGCC | chr6:43770945-43770968_+ |
| | | 1497 | AGTAGCTCGCCGAGGCGCCG | chr6:43771149-43771172_+ |
| | | 1498 | GGCTTCCCCCGCGCGGACCA | chr6:43770905-43770928_− |
| | | 1499 | GCCGCGAGAAGTGCTAGCTC | chr6:43770940-43770963_+ |
| | | 1500 | CCTCTCCGGCTCGGGCTGTG | chr6:43771183-43771206_− |
| VEGFB | ENST00000309422.6 | 1501 | GCCCAGTGGGCACACACTCC | chr11:64235966-64235989_− |
| | | 1502 | TGCGTGACTGTGCAGCGCTG | chr11:64235922-64235945_+ |
| | | 1503 | AGGGCTCATGGTGCCCGCCG | chr11:64234819-64234842_− |
| | | 1504 | ACAGTGCTGTGAAGCCAGAC | chr11:64237200-64237223_+ |
| | | 1505 | CGGACTTGGTGCTGCCCAGT | chr11:64235979-64236002_− |
| WEE1 | ENST00000450114.6 | 1506 | TTGCGGAAGGTCTTGTGTGG | chr11:9574452-9574475_− |
| | | 1507 | ACTCGCCGCTGCCGCCCGCG | chr11:9574108-9574131_+ |
| | | 1508 | TCCTCCTCACAGTCGCTGCA | chr11:9574017-9574040_− |
| | | 1509 | GAGGAGGACCTGTTGCTGCC | chr11:9574200-9574223_+ |
| | | 1510 | CGATCAAAAAAGCCATTGGC | chr11:9576624-9576647_+ |
| XIAP | ENST00000434753.7 | 1511 | CTATCTTTTGAGAACTGGGC | chrX:123886075-123886098_+ |
| | | 1512 | GCTTCATAATCTGCCATGGA | chrX:123886439-123886462_− |
| | | 1513 | CCAAATTGCAGATTTATCAA | chrX:123885923-123885946_+ |
| | | 1514 | CTTCTTCACTATACATGGCA | chrX:123886132-123886155_− |
| | | 1515 | ATAGTCTGGCCAGTTCTGAA | chrX:123886167-123886190_− |
| XPO1 | ENST00000401558.6 | 1516 | TAAAGGAGCATCCTGATGCT | chr2:61526467-61526490_− |
| | | 1517 | AACAAGAATGGCCCAAACAT | chr2:61499864-61499887_− |
| | | 1518 | TTAAATGCTTAGATTTGACT | chr2:61499719-61499742_+ |
| | | 1519 | GGCAAATATAGCTGTCTCCT | chr2:61493906-61493929_+ |
| | | 1520 | TGGTCTCAAAAATATATCCC | chr2:61498698-61498721_+ |
| YES1 | ENST00000584307.5 | 1521 | GAAGCAAGATCAATCGCTAC | chr18:747979-748002_− |
| | | 1522 | GGATCCTCCAAATGGTGTCA | chr18:756632-756655_+ |
| | | 1523 | TTGAATCCTGGAAATCAACG | chr18:745982-746005_− |
| | | 1524 | ATGTTTCGGCGAAGTGTGGA | chr18:743259-743282_− |
| | | 1525 | CAGAGTATCAAATTGTGCTC | chr18:745732-745755_+ |

TABLE 6B
Library of gene modulatory reagents.

| | SEQ ID | | |
|---|---|---|---|
| Target gene | NO | gRNA # | gRNA Seq |
| ANPEP | 1526 | 1 | CGTTCAGGGCATAATCGCCG |
| ANPEP | 1527 | 2 | TCACGGTGGATACCAGCACG |
| ANPEP | 1528 | 3 | CATCACGCTTATCCACCCCA |
| ANPEP | 1529 | 4 | CCTTGGACCAAAGTAAAGCG |
| HDAC11 | 1530 | 1 | GGCGAGCGTGATGTCCGCAT |
| HDAC11 | 1531 | 2 | CGAGGCTGGGCCATCAACGT |
| HDAC11 | 1532 | 3 | GCAACAGCAAAGGACCACTG |
| HDAC11 | 1533 | 4 | ACAACCGCCACATCTACCCA |
| ROCK1 | 1534 | 1 | GCAAAGTCTGTGGCAATGTG |
| ROCK1 | 1535 | 2 | AGTCATACCTGAACAACCCA |
| ROCK1 | 1536 | 3 | TTACATATTATAGCAATCGT |
| ROCK1 | 1537 | 4 | CATGGTACGATGTGATACAG |
| BRAF | 1538 | 1 | ATACCCAATAGAGTCCGAGG |
| BRAF | 1539 | 2 | TCATAATTAACACACATCAG |
| BRAF | 1540 | 3 | ACAAATGATTAAGTTGACAC |
| BRAF | 1541 | 4 | GGGGGTAGCAGACAAACCTG |
| NRAS | 1542 | 1 | CCATGAGAGACCAATACATG |
| NRAS | 1543 | 2 | TGAATATGATCCCACCATAG |
| NRAS | 1544 | 3 | TGATGTACCTATGGTGCTAG |
| NRAS | 1545 | 4 | TTGCGGATATTAACCTCTAC |
| PPARG | 1546 | 1 | CACGACATTCAATTGCCATG |
| PPARG | 1547 | 2 | AGTGAAGGGCTTGATATCAA |
| PPARG | 1548 | 3 | TGGCATCTCTGTGTCAACCA |
| PPARG | 1549 | 4 | ACAGATGTGATCTTAACTGT |
| INIIBB | 1550 | 1 | GCATACCTTCCCACTCACGG |
| INIIBB | 1551 | 2 | CAGGACACCTGTACGTCGTG |
| INIIBB | 1552 | 3 | GAAGAAGTATAGGCGGACCC |
| INIIBB | 1553 | 4 | TCGCCTGGGTCCACGAACAC |
| TOP2A | 1554 | 1 | TCCCGTCAGAACATGGACCC |
| TOP2A | 1555 | 2 | AGCATTGTAAAGATGTATCG |
| TOP2A | 1556 | 3 | TGTACGCTTATCCTGACTGA |
| TOP2A | 1557 | 4 | ATTCAGTACCAAATTTACTG |
| ADA | 1558 | 1 | TCACCGTACTGTCCACGCCG |
| ADA | 1559 | 2 | TGGACATACTCAAGACAGAG |
| ADA | 1560 | 3 | CACAGACTGGTCCCCCAAGG |
| ADA | 1561 | 4 | TCCCAGCTAACACAGCAGAG |
| SRC | 1562 | 1 | GACCTGGAACGGTACCACCA |
| SRC | 1563 | 2 | TCAATGCAGAGAACCCGAGA |
| SRC | 1564 | 3 | TGTCCTTCAAGAAAGGCGAG |
| SRC | 1565 | 4 | GTCACGGAGTACATGAGCAA |
| PIM1 | 1566 | 1 | GGCGAGTCGGAGGACAACTG |
| PIM1 | 1567 | 2 | GTCCAGGAGCCTAATGACGC |
| PIM1 | 1568 | 3 | AAGGACCGGATTTCCGACTG |
| PIM1 | 1569 | 4 | TCTTCGACTTCATCACGGAA |
| RPTOR | 1570 | 1 | GATCTGGCAGAACTTCGACT |
| RPTOR | 1571 | 2 | CTTACGTCGCAACGCCAAGG |
| RPTOR | 1572 | 3 | TGGTGTGGACCCTCCCGATG |
| RPTOR | 1573 | 4 | CACATGGCGTGCATGTACGT |
| PTK6 | 1574 | 1 | CGCACCCGACAGGACGTAGT |
| PTK6 | 1575 | 2 | CGTGGAAGACGTCCCCCGCG |
| PTK6 | 1576 | 3 | CTCTCCCAGTCATCCCAATG |
| PTK6 | 1577 | 4 | GCCGACGCACAGCTTCCGAG |
| CDK7 | 1578 | 1 | AGCTCCAAATAGTAACTCGG |
| CDK7 | 1579 | 2 | ATCTCTGGCCTTGTAAACGG |
| CDK7 | 1580 | 3 | TTTCCATAAAATCAAAGACA |
| CDK7 | 1581 | 4 | TTAAAAACCTTACCCTATGT |
| PSMB10 | 1582 | 1 | CGATCAGCGATGCACCCACG |
| PSMB10 | 1583 | 2 | CACTAACGATTCGGTCGTGG |
| PSMB10 | 1584 | 3 | GAGCTACACGCGTTATCTAC |
| PSMB10 | 1585 | 4 | TCTCCTTCGAGAACTGCCAA |
| MAP2K1 | 1586 | 1 | CATCCTAGTCAACTCCCGTG |
| MAP2K1 | 1587 | 2 | GCAGCAGCGAAAGCGCCTTG |
| MAP2K1 | 1588 | 3 | GGGCACAAGGTCCTACATGT |
| MAP2K1 | 1589 | 4 | TATGGTGCGTTCTACAGCGA |
| VEGFB | 1590 | 1 | CACACTCCAGGCCATCGTCA |
| VEGFB | 1591 | 2 | CATCTATCCATGACACCACT |
| VEGFB | 1592 | 3 | GCAGCACCAAGTCCGGATGC |
| VEGFB | 1593 | 4 | CGGTACCCGAGCAGTCAGCT |
| SLC2A2 | 1594 | 1 | GTGCCACTAGAATAGGCTGT |
| SLC2A2 | 1595 | 2 | CCTTTACATCAAGTTAGATG |
| SLC2A2 | 1596 | 3 | CACCGATATACATAGGAACC |
| SLC2A2 | 1597 | 4 | TAGTTGGAGCTCTCTTGATG |
| EHMT1 | 1598 | 1 | GGGCCGGTGCACAAACAGCG |
| EHMT1 | 1599 | 2 | TTCGGCTGCTTCCATCAACG |
| EHMT1 | 1600 | 3 | ACTTATACGACTCAGAACCT |
| EHMT1 | 1601 | 4 | CAACACACTAACTCGGATAG |
| CDK5 | 1602 | 1 | TAGCCGCAATGTGCTACACA |
| CDK5 | 1603 | 2 | CCTTTACAATCTCAGGATCG |
| CDK5 | 1604 | 3 | CGTCCGCTGTTACTCAGCTG |
| CDK5 | 1605 | 4 | CCGGGAGACTCATGAGATCG |
| CXCR2 | 1606 | 1 | GGCGGCATCTAGTAGAAAAG |
| CXCR2 | 1607 | 2 | TAAGATGACCAGCATCACGA |
| CXCR2 | 1608 | 3 | CAGTGGCACGATGAAGCCAA |
| CXCR2 | 1609 | 4 | CCAGCCTGCTATGAGGACAT |
| IFNAR1 | 1610 | 1 | GTACATTGTATAAAGACCAC |
| IFNAR1 | 1611 | 2 | ATAATTGGATAAAATTGTCT |
| IFNAR1 | 1612 | 3 | CTCCGCGTACAAGCATCTGA |
| IFNAR1 | 1613 | 4 | TAGATGACAACTTTATCCTG |
| EHMT2 | 1614 | 1 | CAAGAGGTGACCATCCCCCG |
| EHMT2 | 1615 | 2 | CTCCAGGTGGTTGTTCACCA |
| EHMT2 | 1616 | 3 | CGGACAGGTACAACTGCCGA |
| EHMT2 | 1617 | 4 | CTCTCCGTCCACACTCTCAG |
| DHX9 | 1618 | 1 | CAAAACATTATACTGGCATG |
| DHX9 | 1619 | 2 | TCAATCACAGCATCCAAAGG |
| DHX9 | 1620 | 3 | TGGATGTGGGAAAACCACAC |
| DHX9 | 1621 | 4 | GGAGATTTACCAACAACCAT |
| RAC1 | 1622 | 1 | TCACATCTAGTGGTATCCTG |
| RAC1 | 1623 | 2 | CTGTTTGCGGATAGGATAGG |
| RAC1 | 1624 | 3 | ATTTAAGATACTTACACAGT |
| RAC1 | 1625 | 4 | CTGGGCTTATGGGATACAGC |
| KIF11 | 1626 | 1 | TCTTGTGTAGGAGTATACGG |
| KIF11 | 1627 | 2 | GACTGAATTACCTTGTTACG |
| KIF11 | 1628 | 3 | GAAGTTAGTGTACGAACTGG |
| KIF11 | 1629 | 4 | ACCTAATGAAGAGTATACCT |
| TUBD1 | 1630 | 1 | AATGAATTCTCAGACATGTG |
| TUBD1 | 1631 | 2 | ATAGAGGGACAAATACCTAG |
| TUBD1 | 1632 | 3 | AGTGACTCACACAGTTCCCA |
| TUBD1 | 1633 | 4 | GCATGCTTCTGTCAAAAACA |
| PSMD1 | 1634 | 1 | CCTTAGATCGTTAGACACGG |
| PSMD1 | 1635 | 2 | TGAATCTCTCTGTCGTGACA |
| PSMD1 | 1636 | 3 | GTTAGCCAGAGCCACTAACT |
| PSMD1 | 1637 | 4 | TCACTACACCAAACAATGTG |
| HDAC9 | 1638 | 1 | AGCTTTGATCCAATGATGTG |
| HDAC9 | 1639 | 2 | AACAGCATGAGAACTTGACA |
| HDAC9 | 1640 | 3 | TTTCCCTCTAAAGTAACATG |
| HDAC9 | 1641 | 4 | GAGAGCGCACGTGTGTGCGT |
| PIGF | 1642 | 1 | GGTCCTAACAAACATAAGCA |
| PIGF | 1643 | 2 | TTTCAAACTTACTCTATCAG |
| PIGF | 1644 | 3 | AAGAAGTTCATTATCACACA |
| PIGF | 1645 | 4 | TATTGGAAACACACTTGACA |
| TUBA4A | 1646 | 1 | GCTCGATGTCTAGGTTGCGG |
| TUBA4A | 1647 | 2 | TTCCTCTCACCAATGACCGT |
| TUBA4A | 1648 | 3 | GAGCCGCTCCATCAGGAGTG |
| TUBA4A | 1649 | 4 | GTGACAAGACCATTGGTGGA |
| TOP1MT | 1650 | 1 | GCTCCGATAACACCGTCACG |
| TOP1MT | 1651 | 2 | TCATGAATACACAACAAAGG |
| TOP1MT | 1652 | 3 | CCATACGAGCCCCTTCCCGA |
| TOP1MT | 1653 | 4 | GTGGCGACCATCCCAAGATG |
| NTRK3 | 1654 | 1 | TCTTCACACGCTCAACGCCG |
| NTRK3 | 1655 | 2 | CGTCAACCTGACCGTACGAG |
| NTRK3 | 1656 | 3 | CATGTGGAATACTACCAAGA |
| NTRK3 | 1657 | 4 | TCATGCCATCAACTTGACGC |
| RXRA | 1658 | 1 | CCTACGTGGAGGCAAACATG |
| RXRA | 1659 | 2 | AGGACTGCCTGATTGACAAG |
| RXRA | 1660 | 3 | AGGAAGCCATGTTTCCTGAG |
| RXRA | 1661 | 4 | CAAGGACCGGAACGAGAATG |
| MCL1 | 1662 | 1 | AGGCGCTGGAGACCTTACGA |
| MCL1 | 1663 | 2 | GTAATAACACCAGTACGGAC |
| MCL1 | 1664 | 3 | AGTCGCTGGAGATTATCTCT |
| MCL1 | 1665 | 4 | CCAAAAGTCGCCCTCCCGGG |
| MTOR | 1666 | 1 | TCAGGAAATGATCCGCACAG |
| MTOR | 1667 | 2 | GGTGATGGCCTGGACAACCA |
| MTOR | 1668 | 3 | CAGCATCGGATGCTTAGGAG |
| MTOR | 1669 | 4 | GTGAAGGGGGTAATGTGACG |
| HDAC7 | 1670 | 1 | TGCAGTCGGTCCACTCTGAG |
| HDAC7 | 1671 | 2 | GTTACCTGTAGGGAATGCCG |
| HDAC7 | 1672 | 3 | AAGGACTGGGCAAAGTGGAA |
| HDAC7 | 1673 | 4 | GACCTGGAGACAGATGGCGG |
| CHEK1 | 1674 | 1 | ACACCACCTGAAGTGACTCG |
| CHEK1 | 1675 | 2 | TGGTATTGGAATAACTCACA |
| CHEK1 | 1676 | 3 | CTTACTGCAATGCTCGCTGG |
| CHEK1 | 1677 | 4 | TTTCTGGAGTACTGTAGTGG |
| PSEN1 | 1678 | 1 | GCCACGCAGTCCATTCAGGG |
| PSEN1 | 1679 | 2 | TAAAACCTATAACGTTGCTG |
| PSEN1 | 1680 | 3 | ACCTGCCGGGAGTTACCCTG |
| PSEN1 | 1681 | 4 | TGTATTTATACAGAACCACC |
| FOLH1 | 1682 | 1 | TTATAGGCGTGGAATTGCAG |
| FOLH1 | 1683 | 2 | GGAGAGAAAGCACTGAAAGG |
| FOLH1 | 1684 | 3 | GAGGCGCCCCCCTACCGAAG |
| FOLH1 | 1685 | 4 | AAGATTCCAACCATCTGGAT |
| FKBP1A | 1686 | 1 | GGGCGCACCTTCCCCAAGCG |
| FKBP1A | 1687 | 2 | ACCGGTGTAGTGCACCACGC |
| FKBP1A | 1688 | 3 | GGCAAGCAGGAGGTGATCCG |
| FKBP1A | 1689 | 4 | GAAACCATCTCCCCAGGAGA |
| TUBG1 | 1690 | 1 | GACATGATGGTAGACACCTG |
| TUBG1 | 1691 | 2 | CGTGGAGGAGTTCGCCACCG |
| TUBG1 | 1692 | 3 | AGATGGTAGTGACAGTCTAG |
| TUBG1 | 1693 | 4 | TGACTGGTCCGTAGTGAGAG |
| GNRHR | 1694 | 1 | GTCCTGCAAAGACACTACTG |
| GNRHR | 1695 | 2 | GGAAGAAAGTAACCGTCACT |
| GNRHR | 1696 | 3 | TGTGGAACATTACAGTCCAA |
| GNRHR | 1697 | 4 | AGTCTCCAACAGGTTGGCTA |
| PLK2 | 1698 | 1 | ATCACCACCATTCGCACTCG |
| PLK2 | 1699 | 2 | AGCCATGGAACTAAAAGTTG |
| PLK2 | 1700 | 3 | TATGTTGTCCAAAAACCCAG |
| PLK2 | 1701 | 4 | GTCCTCAACAAACAAGGACA |
| PDGFRB | 1702 | 1 | TGTGGTAAGGCATATCCAAG |
| PDGFRB | 1703 | 2 | GACTAACGTGACGTACTGGG |
| PDGFRB | 1704 | 3 | GTCCCCTATGATCACCAACG |
| PDGFRB | 1705 | 4 | CTCCCGTGTCTAGCCCAGTG |
| FOLR1 | 1706 | 1 | AGTTGGGGGAGCACTCGTAG |
| FOLR1 | 1707 | 2 | CCATCCAGTGTCGACCCTGG |
| FOLR1 | 1708 | 3 | CATGAACGCCAAGCACCACA |
| FOLR1 | 1709 | 4 | GCTGCTCCTTCTAGTGTGGG |
| PLK3 | 1710 | 1 | GCTGATAGGGAGTCGATCGG |
| PLK3 | 1711 | 2 | GGTGCGAAAAACGCACGATG |
| PLK3 | 1712 | 3 | GTGACCATACATCCGCCTCA |
| PLK3 | 1713 | 4 | CTCAAGTACTTGCACCAGCG |
| MST1R | 1714 | 1 | CTGCCCACCTAAGCTTACTG |
| MST1R | 1715 | 2 | GTGGCATGTTAGTCACGGTG |
| MST1R | 1716 | 3 | GTGGGTATCAACGTGACCGT |
| MST1R | 1717 | 4 | CTCGGACCACATATTCAGGA |
| TUBA1A | 1718 | 1 | CTGTGATAAGTTGCTCAGGG |
| TUBA1A | 1719 | 2 | AGGTTGGACGCTCAATATCG |
| TUBA1A | 1720 | 3 | CTGGAGACCCGTGCACTGGT |
| TUBA1A | 1721 | 4 | TACAGAAAGCTGTTCATGGT |
| POLA1 | 1722 | 1 | CATGACACAACAGCTCACAT |
| POLA1 | 1723 | 2 | CAACAAGAACTCGTTACGCT |
| POLA1 | 1724 | 3 | AAGCACGCAATAAAGACAAG |
| POLA1 | 1725 | 4 | CTCTACACACTTTACCGTGG |
| DYRK1A | 1726 | 1 | TTCAACCAAAATACACCCGA |
| DYRK1A | 1727 | 2 | TCAGCAACCTCTAACTAACC |
| DYRK1A | 1728 | 3 | TGAGAAACACCAATTTCCGA |
| DYRK1A | 1729 | 4 | TTACAGGAGTACAAACCACC |
| ERBB4 | 1730 | 1 | CTGGTGTGTCCAGATAGCTA |
| ERBB4 | 1731 | 2 | AGCGGCGACACGACAGACAT |
| ERBB4 | 1732 | 3 | ATGTCCAGATGGCTTACAGG |
| ERBB4 | 1733 | 4 | ATAGAGTACTCTTCCACCAA |
| NCSTN | 1734 | 1 | TAAAGCCTATAAATACAACT |
| NCSTN | 1735 | 2 | CCAGCAGAACCATGTAAGGG |
| NCSTN | 1736 | 3 | ATGGTCTACGATATGGAGAA |
| NCSTN | 1737 | 4 | CAGTGCCCAAATGATGGGTT |
| ANGPT2 | 1738 | 1 | ACCGAGTCATCGTATTCGAG |
| ANGPT2 | 1739 | 2 | ACCAAACAGCGGAGCAAACG |
| ANGPT2 | 1740 | 3 | TAACGTGTAGATGCCATTCG |
| ANGPT2 | 1741 | 4 | AAGAACTGAATTATTCACCG |
| AR | 1742 | 1 | AGGGTACCACACATCAGGTG |
| AR | 1743 | 2 | CCTTAAAGACATCCTGAGCG |
| AR | 1744 | 3 | GGACGCAACCTCTCTCGGGG |
| AR | 1745 | 4 | TCCAGCTTGATGCGAGCGTG |
| SLAMF7 | 1746 | 1 | TCAGGGAGTAGCCTCCATCT |
| SLAMF7 | 1747 | 2 | ACTCAGGGATCTACTATGTG |
| SLAMF7 | 1748 | 3 | GACCAATCTGACATGCTGCA |
| SLAMF7 | 1749 | 4 | TGGCTGTATGGTGACAAGAG |
| DHFR | 1750 | 1 | CGGCCCGGCAGATACCTGAG |
| DHFR | 1751 | 2 | AACCTTAGGGAACCTCCACA |
| DHFR | 1752 | 3 | GTCGCTGTGTCCCAGAACAT |
| DHFR | 1753 | 4 | GACATGGTCTGGATAGTTGG |
| PDGFRA | 1754 | 1 | TAAGTCAGGGGAAACGATTG |
| PDGFRA | 1755 | 2 | CCTGCGTTCTGAACTCACGG |
| PDGFRA | 1756 | 3 | GACTTGGTCGATGATCACCA |
| PDGFRA | 1757 | 4 | AAATAATCCGTCATTCCTAG |
| TUBB3 | 1758 | 1 | CTGGCCCGGGAAGCGCAAGG |
| TUBB3 | 1759 | 2 | CATGGACAGTGTCCGCTCAG |
| TUBB3 | 1760 | 3 | CAGCTGGTGGATGGACAGCG |
| TUBB3 | 1761 | 4 | CTGGGCCAAGGGTCACTACA |
| IGF1R | 1762 | 1 | GGAGAACGACCATATCCGTG |
| IGF1R | 1763 | 2 | TTCCGAAATTTACCGCATGG |
| IGF1R | 1764 | 3 | GGTACAATGTGAAAGGCCGA |
| IGF1R | 1765 | 4 | TGTGGGGAATAAGCCCCCAA |
| RAF1 | 1766 | 1 | GACCATGTGGACATTAGGTG |
| RAF1 | 1767 | 2 | AGACTTCTCCACGAACACAA |
| RAF1 | 1768 | 3 | GCCGAACAAGCAAAGAACAG |
| RAF1 | 1769 | 4 | TGTTGCAGTAAAGATCCTAA |
| SYK | 1770 | 1 | GGTGTACGAGAGCCCCTACG |
| SYK | 1771 | 2 | CACACCACTACACCATCGAG |
| SYK | 1772 | 3 | ATCCGAGCCAGAGACAACAA |
| SYK | 1773 | 4 | TAATAACTCATCTTTAAGAG |
| MAP2 | 1774 | 1 | TTTGTCACCAGAGATATGCG |
| MAP2 | 1775 | 2 | CCTGATAAAAAGGACATGCA |
| MAP2 | 1776 | 3 | CATGCCAAGTCCCTTTCAAG |
| MAP2 | 1777 | 4 | GATTGCCGTCAAATTGTCAG |
| FOLR2 | 1778 | 1 | AACTTTAACTGGGACCACTG |
| FOLR2 | 1779 | 2 | AGAGGACTGTCAGCGCTGGT |
| FOLR2 | 1780 | 3 | ACTGGCACAGAGGATGGGAC |
| FOLR2 | 1781 | 4 | AAGCACCACAAGACAAAGCC |
| CDK9 | 1782 | 1 | CCAGAGTGTCACCACACGGT |
| CDK9 | 1783 | 2 | TCTCCCGCAAGGCTGTAATG |
| CDK9 | 1784 | 3 | GCGGTTATAGGGGGAAGCTG |
| CDK9 | 1785 | 4 | GCTGACTGATGAGGGCGAGT |
| PRKCG | 1786 | 1 | ACTCGAAGGTCACAAATTCG |
| PRKCG | 1787 | 2 | ATTCCACACAGGGTTTAGCG |
| PRKCG | 1788 | 3 | CGAGTATTACAATGTGCCGG |
| PRKCG | 1789 | 4 | CTCTACGGGCTTGTGCACCA |
| MS4A1 | 1790 | 1 | TGGGTGCATAGATCCCTGCT |
| MS4A1 | 1791 | 2 | TCATGAAGAAGCTTTGCGTG |
| MS4A1 | 1792 | 3 | GTAACAGTATTGGGTAGATG |
| MS4A1 | 1793 | 4 | TATTATTTCCGGATCACTCC |
| INHA | 1794 | 1 | TGCCCCGAAGACATGCCCTG |
| INHA | 1795 | 2 | GAGGACAAGTCAGCTGCCAG |
| INHA | 1796 | 3 | CGGACCAGACCACCCAGTGG |
| INHA | 1797 | 4 | CAGCAGCACCAGGACGGGGT |
| F2R | 1798 | 1 | GGAGCTGGTCAAATATCCGG |
| F2R | 1799 | 2 | AAATGACCGGGGATCTAAGG |
| F2R | 1800 | 3 | TGGCCATGATGTTTAGTGGG |
| F2R | 1801 | 4 | CACAAACAGCACATCTGCCG |
| MAPK11 | 1802 | 1 | GCTTCTGGACGTCTTCACGC |
| MAPK11 | 1803 | 2 | CTGCGGTCGCACCTACCCGG |
| MAPK11 | 1804 | 3 | TGCGCGCGTGGATCAGCGAC |
| MAPK11 | 1805 | 4 | CCAGACGGAGCCGTAGGCGC |
| PLK1 | 1806 | 1 | AACCAAAGTCGAATATGACG |
| PLK1 | 1807 | 2 | CCTGCCTGACCATTCCACCA |
| PLK1 | 1808 | 3 | AGCCAAGCACAATTTGCCGT |
| PLK1 | 1809 | 4 | CGTTGTCCTCGAAAAAGCCG |
| TUBB | 1810 | 1 | GCTGACCACACCAACCTACG |
| TUBB | 1811 | 2 | CCCCACCGGCACCTACCACG |
| TUBB | 1812 | 3 | AGATCCACCAGGATGGCACG |
| TUBB | 1813 | 4 | CTGCATTCCAGGTCAGTCTG |
| HDAC8 | 1814 | 1 | ATTTGAGCGTATTCTCTACG |
| HDAC8 | 1815 | 2 | ATAGTCAAATATCCCTTCAG |
| HDAC8 | 1816 | 3 | GTAAATGTGCCCATTCAGGA |
| HDAC8 | 1817 | 4 | GCTGCAGATAAGCATCAGTG |
| PTCH1 | 1818 | 1 | TGATGTCGATGGGCTTATCG |
| PTCH1 | 1819 | 2 | AGCGGGAATTGGGATTAACG |
| PTCH1 | 1820 | 3 | AAATGTACGAGCACTTCAAG |
| PTCH1 | 1821 | 4 | AAGGTGTAATAATCAAACAA |
| PARP3 | 1822 | 1 | GTGGACATGTTGGATCCACG |
| PARP3 | 1823 | 2 | AGCAAGCAACAGATTGCACG |
| PARP3 | 1824 | 3 | ACTTATCGAAGTACAGGCAG |
| PARP3 | 1825 | 4 | GATGACGGTGTAAAAGTGTG |
| HDAC2 | 1826 | 1 | GATGTATCAACCTAGTGCTG |
| HDAC2 | 1827 | 2 | TACAACAGATCGTGTAATGA |
| HDAC2 | 1828 | 3 | CCTCCTCCAAGCATCAGTAA |
| HDAC2 | 1829 | 4 | TCAAAGAGTCCATCAAACAC |
| APH1A | 1830 | 1 | GACACCACTGATGATACCGA |
| APH1A | 1831 | 2 | GCGTTATCATCCTGGTCGCA |
| APH1A | 1832 | 3 | AGTGATCAAGAAAAGCGCGA |
| APH1A | 1833 | 4 | GCTCACCATAGGCCATCTGG |
| PSMB1 | 1834 | 1 | ATAATAAGGCCATGACTACG |
| PSMB1 | 1835 | 2 | GTATACAGCTTTGATCCAGT |
| PSMB1 | 1836 | 3 | TCTGATACTCGATTGAGTGA |
| PSMB1 | 1837 | 4 | TTACCCTCCGTTGAAAACGT |
| DYRK3 | 1838 | 1 | CCACGGGCGCAGTTCAACCA |
| DYRK3 | 1839 | 2 | TTGGTGGTCCCAATAATGGA |
| DYRK3 | 1840 | 3 | GGCATCCAAAGATTGCAAGA |
| DYRK3 | 1841 | 4 | TGCAGAGTACATTTGAACAG |
| JAK3 | 1842 | 1 | TGACGCGGAGGCGTATTCGG |
| JAK3 | 1843 | 2 | ACTCTCCAGGCTTAACACAG |
| JAK3 | 1844 | 3 | GTGTACAAATTCCTGCACCA |
| JAK3 | 1845 | 4 | AGCTCTCGAAGACTGCTGTG |
| ATR | 1846 | 1 | TGACGTGCGAAAACAAGATG |
| ATR | 1847 | 2 | GCCCAGGTCACCAATTGTGG |
| ATR | 1848 | 3 | CTGTGTGAGATGGTCAAGCA |
| ATR | 1849 | 4 | GATGCTTTGATTTATATGCA |
| FGFR4 | 1850 | 1 | GAGGTAGATCTAGACTCACG |
| FGFR4 | 1851 | 2 | TTGCACATAGGGGAAACCGT |
| FGFR4 | 1852 | 3 | GGTAACTGTGCCTATTCGAG |
| FGFR4 | 1853 | 4 | TGGTGGCCACTGGTACAAGG |
| MAPK1 | 1854 | 1 | ATCCAGACCATGATCACACA |
| MAPK1 | 1855 | 2 | CAACCTCTCGTACATCGGCG |
| MAPK1 | 1856 | 3 | GCTGACCTTGAGATCACAGG |
| MAPK1 | 1857 | 4 | CCTACTGCCAGAGAACCCTG |
| HPSE | 1858 | 1 | TGGCAATCTCAAGTCAACCA |
| HPSE | 1859 | 2 | TGGTGACGGACAGGAACGAG |
| HPSE | 1860 | 3 | CCACCAAACCTCAGGTACGC |
| HPSE | 1861 | 4 | TAAAAATGTCCAATACATCA |
| IL2RB | 1862 | 1 | GCTGGGAAAAGAACTTCGAG |
| IL2RB | 1863 | 2 | CCACAGATGCAACATAAGCT |
| IL2RB | 1864 | 3 | TTGGGAAGGACACCATTCCG |
| IL2RB | 1865 | 4 | CAGGGTGACGATGTCAACTG |
| BTK | 1866 | 1 | TATGAGTATGACTTTGAACG |
| BTK | 1867 | 2 | GATGGTAGTTAATGAGCTCA |
| BTK | 1868 | 3 | ATAAGGAGTTACCGTATCCC |
| BTK | 1869 | 4 | CTGTGTTTGCTAAATCCACA |
| IHH | 1870 | 1 | CTTGACGGAGCAATGCACGT |
| IHH | 1871 | 2 | CCAGCAGTCCATACTTATTG |
| IHH | 1872 | 3 | GATGTCTGGATTGTAATTGG |
| IHH | 1873 | 4 | GCGAGCGGCACGAGTTTGCG |
| RARG | 1874 | 1 | TGGGCAAGTATACCACGGTG |
| RARG | 1875 | 2 | GGGCTCAGCATCTCGAAAGG |
| RARG | 1876 | 3 | AAGCATGGCTTGTAGACCCG |
| RARG | 1877 | 4 | GCTACAGAAGTGCTTCGAAG |
| EDNRA | 1878 | 1 | TGTCAACACTAAGAGCGCAG |
| EDNRA | 1879 | 2 | CACATAGATAAGGTCTCCAA |
| EDNRA | 1880 | 3 | TGAAGCGATTGGCTTCGTCA |
| EDNRA | 1881 | 4 | CAACATCTCACAAGTCATGA |
| HSPA1B | 1882 | 1 | TCCATCCTGACGATCGACGA |
| HSPA1B | 1883 | 2 | GAGCTACAAGGGGGAGACCA |
| HSPA1B | 1884 | 3 | ACACCGTGTTTGACGCGAAG |
| HSPA1B | 1885 | 4 | AGGATGCGGGTGTGATCGCG |
| BIRC5 | 1886 | 1 | ATGCGGTGGTCCTTGAGAAA |
| BIRC5 | 1887 | 2 | GAACATAAAAAGCATTCGTC |
| BIRC5 | 1888 | 3 | GCTGCGCCTGCACCCCGGAG |
| BIRC5 | 1889 | 4 | CAAGTCTGGCTCGTTCTCAG |
| PDE5A | 1890 | 1 | TGTTGCTGAAGGTTCAACAC |
| PDE5A | 1891 | 2 | GGGGCACTGTTATCTGCACG |
| PDE5A | 1892 | 3 | AAGAGAGCTACAGTCGTTAG |
| PDE5A | 1893 | 4 | AATTAAGAATCATAGGGAAG |
| MAP3K7 | 1894 | 1 | ACCCAAAGCGCTAATTCACA |
| MAP3K7 | 1895 | 2 | AATATTAGGATGGTTCACAC |
| MAP3K7 | 1896 | 3 | CCCAGCTTTCCGAATCATGT |
| MAP3K7 | 1897 | 4 | CACACATGACCAATAACAAG |
| JAK1 | 1898 | 1 | CCGGAAGTAGCCATCTACCA |
| JAK1 | 1899 | 2 | GCCTAGACAGCACCGTAATG |
| JAK1 | 1900 | 3 | TGGTTTCATTCGAATGACGG |
| JAK1 | 1901 | 4 | CACACTTACTCTCCACGTCG |
| PARP1 | 1902 | 1 | CGATGCCTATTACTGCACTG |
| PARP1 | 1903 | 2 | TACCGATCACCGTACCCACA |
| PARP1 | 1904 | 3 | AGCTAGGCATGATTGACCGC |
| PARP1 | 1905 | 4 | GGCCATGATTGAGAAACTCG |
| NR3C1 | 1906 | 1 | TAGAAAAAACTGTTCGACCA |
| NR3C1 | 1907 | 2 | CATCGAACTCTGCACCCCTG |
| NR3C1 | 1908 | 3 | ATCAACAGGTCTGATCTCCA |
| NR3C1 | 1909 | 4 | CTTTAAGTCTGTTTCCCCCG |
| IL6 | 1910 | 1 | CAAATTCGGTACATCCTCGA |
| IL6 | 1911 | 2 | TGCCTGGTGAAAATCATCAC |
| IL6 | 1912 | 3 | TTTGTCAATTCGTTCTGAAG |
| IL6 | 1913 | 4 | TACTCTCAAATCTGTTCTGG |
| MSLN | 1914 | 1 | GCCCCGCAGAGCGTCCATCG |
| MSLN | 1915 | 2 | GGTGCTGGATCACAGACTCG |
| MSLN | 1916 | 3 | ACCCACCTAACATTTCCAGG |
| MSLN | 1917 | 4 | CAGCCGGGGTAGCAGCACTT |
| IKBKB | 1918 | 1 | GCTGGTTCATATCTTGAACA |
| IKBKB | 1919 | 2 | GCCATGGAGTACTGCCAAGG |
| IKBKB | 1920 | 3 | TTTGCAGGCATTCAAAAGTG |
| IKBKB | 1921 | 4 | TGAGGGCCACACATTGGACA |
| LIMK1 | 1922 | 1 | GTGAAGAATTCCATCCACGT |
| LIMK1 | 1923 | 2 | TCCGGCTTATACTCCCAGCG |
| LIMK1 | 1924 | 3 | CGATAAAGGTCCCACACGTG |
| LIMK1 | 1925 | 4 | GGTGTGGCCGGCAGACTACG |
| AURKC | 1926 | 1 | CTAGGAGGAAGACAATGTGT |
| AURKC | 1927 | 2 | AGATGAACAGCGCACAGCCA |
| AURKC | 1928 | 3 | ATTCTGGAATATGCTCCAAG |
| AURKC | 1929 | 4 | GGAAATAGTTATACAGGCGC |
| BRD2 | 1930 | 1 | CCAGCTGCAATACCTACACA |
| BRD2 | 1931 | 2 | ACCACTCTCTCTACGCATAG |
| BRD2 | 1932 | 3 | ACAGTGGTAGGTATCTCAGG |
| BRD2 | 1933 | 4 | CTTGTTGTAAATGTAACAGT |
| ROS1 | 1934 | 1 | TACACCCCAGTCTACCGCAG |
| ROS1 | 1935 | 2 | CTGGGCTGGAAAGACATATG |
| ROS1 | 1936 | 3 | TGGTGATGCCATACCATGTG |
| ROS1 | 1937 | 4 | GTGCACACCATACCTCCATG |
| PIK3CD | 1938 | 1 | CAAGATGTGCCAATTCTGCG |
| PIK3CD | 1939 | 2 | TGTGCGCAGTAACCCCAACA |
| PIK3CD | 1940 | 3 | CAGCGGCTGCCGGAACACTG |
| PIK3CD | 1941 | 4 | TGATGGCGAAGGAGCCTACG |
| TLR5 | 1942 | 1 | TATACAAGCTATTAGCTGCG |
| TLR5 | 1943 | 2 | TTTGTCATATAACCTTCTGG |
| TLR5 | 1944 | 3 | GACACCTGGATCTTTCACAT |
| TLR5 | 1945 | 4 | TACCCCCTTGACTATTGACA |
| TNKS | 1946 | 1 | CCTACATTAGTCAACTGCCA |
| TNKS | 1947 | 2 | GGTACTCTACAACAGACACG |
| TNKS | 1948 | 3 | TGGTGCTGTGCTGCTAACTC |
| TNKS | 1949 | 4 | GATATTCAGGACTTACTGAG |
| BCL2 | 1950 | 1 | TGTCGCAGAGGGGCTACGAG |
| BCL2 | 1951 | 2 | CTGACGCCCTTCACCGCGCG |
| BCL2 | 1952 | 3 | GGCCTTCTTTGAGTTCGGTG |
| BCL2 | 1953 | 4 | TGGACATCTCGGCGAAGTCG |
| ITK | 1954 | 1 | ATACTTTGAAGATCGTCATG |
| ITK | 1955 | 2 | AACTATCACCAACATAATGG |
| ITK | 1956 | 3 | ATCCTCAGGAACTCGCACTG |
| ITK | 1957 | 4 | GGAAGGGGCTATGTCAGAAG |
| CDK1 | 1958 | 1 | GACAAAACACAATCCCCTGT |
| CDK1 | 1959 | 2 | GTATTCCAAAAGCTCTGGCA |
| CDK1 | 1960 | 3 | ACCCTTATACACAACTCCAT |
| CDK1 | 1961 | 4 | GATCTCCAGAAGTATTGCTG |
| MET | 1962 | 1 | CCGATCGCACACATTTGTCG |
| MET | 1963 | 2 | AGCTGTGGCAGCGTCAACAG |
| MET | 1964 | 3 | CTCACTGATATCGAATGCAA |
| MET | 1965 | 4 | TACTGTATTGTGTTGTCCCG |
| PIM2 | 1966 | 1 | ATCCTGATAGACCTACGCCG |
| PIM2 | 1967 | 2 | ATAGCAGTGCGACTTCGAGT |
| PIM2 | 1968 | 3 | CAAGCAGGCGGATCACGCCA |
| PIM2 | 1969 | 4 | TGTCACGATGGACAACTCCA |
| TBK1 | 1970 | 1 | TCCACGTTATGATTTAGACG |
| TBK1 | 1971 | 2 | ACAGTGTATAAACTCCCACA |
| TBK1 | 1972 | 3 | AATCAAGAACTTATCTACGA |
| TBK1 | 1973 | 4 | AGTTGATCTTTGGAGCATTG |
| CDK2 | 1974 | 1 | CATGGGTGTAAGTACGAACA |
| CDK2 | 1975 | 2 | CAAATATTATTCCACAGCTG |
| CDK2 | 1976 | 3 | TCTGAGGTTTAAGGTCTCGG |
| CDK2 | 1977 | 4 | AAGCAGAGAGATCTCTCGGA |
| TLR8 | 1978 | 1 | CATCGTTAAAAATGCCCCAG |
| TLR8 | 1979 | 2 | ATTTAAGCGGGAACTGTCCG |
| TLR8 | 1980 | 3 | TCTTACTGAATTGTCCGACT |
| TLR8 | 1981 | 4 | AACTTATCGACTATCAACTT |
| CPT1A | 1982 | 1 | CACATCGTCGTGTACCATCG |
| CPT1A | 1983 | 2 | GCTCAGTGAACATCCACCCG |
| CPT1A | 1984 | 3 | TACGCCAAATCTCTACTACA |
| CPT1A | 1985 | 4 | ACATCTACCTCCGAGGACGA |
| HSPA1A | 1986 | 1 | GACCAAGGCATTCTACCCCG |
| HSPA1A | 1987 | 2 | CCGCAAGTTCGGCGACCCGG |
| HSPA1A | 1988 | 3 | GCCGTCGTCGATCGTCAGGA |
| HSPA1A | 1989 | 4 | CTGCTGCAGGACTTCTTCAA |
| MGMT | 1990 | 1 | CGCAAACGGTGCGCACCGCG |
| MGMT | 1991 | 2 | GGTACTTGGAAAAATGGACA |
| MGMT | 1992 | 3 | CTGCACGAAATAAAGCTCCT |
| MGMT | 1993 | 4 | ACTCTTCGATAGCCTCGGGC |
| VEGFA | 1994 | 1 | TGGTTTCGGAGGCCCGACCG |
| VEGFA | 1995 | 2 | GGAGGGCAGAATCATCACGA |
| VEGFA | 1996 | 3 | GGAGGAAGAGTAGCTCGCCG |
| VEGFA | 1997 | 4 | AGATGTACTCGATCTCATCA |
| PIK3CA | 1998 | 1 | GTTCGAACAGGTATCTACCA |
| PIK3CA | 1999 | 2 | AACCTCGAACCATAGGATCT |
| PIK3CA | 2000 | 3 | GGATTTAGCTATTCCCACGC |
| PIK3CA | 2001 | 4 | GAAGCTGTATAATGCTTGGG |
| PTGS2 | 2002 | 1 | GGGCTCTAGTATAATAGGAG |
| PTGS2 | 2003 | 2 | GTGGCATACATCATCAGACC |
| PTGS2 | 2004 | 3 | TCAAGACAGATCATAAGCGA |
| PTGS2 | 2005 | 4 | AGTATAAGTGCGATTGTACC |
| IL2RG | 2006 | 1 | CATACCAATAATGCAGAGTG |
| IL2RG | 2007 | 2 | CTGCCCATCCACACTAGGCA |
| IL2RG | 2008 | 3 | GGTGCAGTACCGGACTGACT |
| IL2RG | 2009 | 4 | CATATCTCCAGTGATCCCCT |
| INHBA | 2010 | 1 | CGAGGAAGTGGGCTTAAAGG |
| INHBA | 2011 | 2 | ACAGGCAATCCGAACGTCCA |
| INHBA | 2012 | 3 | GCTGCACTTCGAGATTTCCA |
| INHBA | 2013 | 4 | GCGATCAGAAAGCTTCATGT |
| JAK2 | 2014 | 1 | CTGCCACTGCAATACCAACG |
| JAK2 | 2015 | 2 | AATGAAGAGTACAACCTCAG |
| JAK2 | 2016 | 3 | AGAAAACGATCAAACCCCAC |
| JAK2 | 2017 | 4 | TCTTCAGGAGAGAATACCAT |
| NEK11 | 2018 | 1 | CATTATCACGGAGTACTGTG |
| NEK11 | 2019 | 2 | CCAAGGCTATGACACAAAGT |
| NEK11 | 2020 | 3 | GAGTTGACTACATGCATGAG |
| NEK11 | 2021 | 4 | TCAGACAAGAAAGCCAAACG |
| GART | 2022 | 1 | GTCTTCGGGAAGTACCTGAG |
| GART | 2023 | 2 | GCAGAGCAGTCCATCTAAGG |
| GART | 2024 | 3 | TGGCCTTCACAACCAAAGCA |
| GART | 2025 | 4 | AGCTAGGTCATACTCTCCAG |
| PSENEN | 2026 | 1 | CTGTGCCGGAAGTACTACCT |
| PSENEN | 2027 | 2 | CCTGGAGCGAGTGTCCAATG |
| PSENEN | 2028 | 3 | ACAGAACAGAGCCAAATCAA |
| PSENEN | 2029 | 4 | TGAGCACTATCACCCAGAAG |
| PRKDC | 2030 | 1 | GTTCTCAGAAACGATCAACA |
| PRKDC | 2031 | 2 | CTCCATAATCCGGACCACAA |
| PRKDC | 2032 | 3 | GCACATCATCATGCACCGTG |
| PRKDC | 2033 | 4 | GCAACATCAGAATACTATGG |
| LDLR | 2034 | 1 | CTTAAGGTCATTGCAGACGT |
| LDLR | 2035 | 2 | CAGAGCACTGGAATTCGTCA |
| LDLR | 2036 | 3 | GACAACGGCTCAGACGAGCA |
| LDLR | 2037 | 4 | ATGAACAGGATCCACCACGA |
| FGR | 2038 | 1 | CGAGTTGAACTGAACCCGTG |
| FGR | 2039 | 2 | AGGGGACTTCAGAAGCTACG |
| FGR | 2040 | 3 | AGCTTGGATTGAGTCAACAG |
| FGR | 2041 | 4 | GTGACCGAGTTCATGTGTCA |
| DOT1L | 2042 | 1 | GGAGCGAATCGCCAACACG |
| DOT1L | 2043 | 2 | GCTGGAGGACTCATCCAAGG |
| DOT1L | 2044 | 3 | GCAGCAGGTCTACAACCACT |
| DOT1L | 2045 | 4 | TCAGACCGTGTCTCAGACGG |
| DRD2 | 2046 | 1 | TAGCGCGTATTGTACAGCAT |
| DRD2 | 2047 | 2 | CCTGATCGTCAGCCTCGCAG |
| DRD2 | 2048 | 3 | CTCTTCGGACTCAATAACGC |
| DRD2 | 2049 | 4 | GTGGCATAGTAGTTGTAGTG |
| PRKCA | 2050 | 1 | GCTCCACACTAAATCCGCAG |
| PRKCA | 2051 | 2 | CCTTGACCGAGTGAAACTCA |
| PRKCA | 2052 | 3 | AGGAAGGAAACATGGAACTC |
| PRKCA | 2053 | 4 | AGGTGGGGCTTCCGTAAGTG |
| LHCGR | 2054 | 1 | GTGGCTGGGGTAAGTCAACG |
| LHCGR | 2055 | 2 | GCACAATGGAGCCTTCCGTG |
| LHCGR | 2056 | 3 | CTTGGTTTGGGAATCAACTG |
| LHCGR | 2057 | 4 | TAGCCCATAATATCTTCACA |
| ADORA3 | 2058 | 1 | GATGCCCAGGCTGACAACAA |
| ADORA3 | 2059 | 2 | ATGGCGCACATGACAACCAG |
| ADORA3 | 2060 | 3 | GACATTTCTGTGGTACTCTG |
| ADORA3 | 2061 | 4 | ATTGGACTCTGCGCCATAGT |
| TERT | 2062 | 1 | CACACGCTAGTGGACCCCGA |
| TERT | 2063 | 2 | GTGACACCACACAGAAACCA |
| TERT | 2064 | 3 | CTCACGCAGACGGTGCTCTG |
| TERT | 2065 | 4 | GGCCCGCACACGCAGCACGA |
| HDAC10 | 2066 | 1 | AGTCAGATGCAGACGCAGTG |
| HDAC10 | 2067 | 2 | AGGATTTGACTCAGCCATCG |
| HDAC10 | 2068 | 3 | CCGCAGCCCTGGATCGCCTG |
| HDAC10 | 2069 | 4 | GACAACGCCGGATATCACAT |
| PRKCB | 2070 | 1 | TGACGTGGAGTGCACTATGG |
| PRKCB | 2071 | 2 | CAGAGGGCCAAGATCAGTCA |
| PRKCB | 2072 | 3 | CTTGCTGGATGTGATACATG |
| PRKCB | 2073 | 4 | CCACAGTGGTCACAAAACGT |
| GNRH1 | 2074 | 1 | GCAGTCCATAGGACCAGTGC |
| GNRH1 | 2075 | 2 | CCAATTCAAAAACTCCTAGC |
| GNRH1 | 2076 | 3 | GCGTGGTGCATTCGAAGCGT |
| GNRH1 | 2077 | 4 | CTACTGACTTGGTGCGTGGA |
| STAT3 | 2078 | 1 | ACGCCGGTCTTGATGACGAG |
| STAT3 | 2079 | 2 | GAGACCGAGGTGTATCACCA |
| STAT3 | 2080 | 3 | AACATGGAAGAATCCAACAA |
| STAT3 | 2081 | 4 | TCGGCCGGTGCTGTACAATG |
| FGFR2 | 2082 | 1 | CTTAGTCCAACTGATCACGG |
| FGFR2 | 2083 | 2 | TGTGTCTGTTCTAGCACTCG |
| FGFR2 | 2084 | 3 | GCCGGCAAATGCCTCCACAG |
| FGFR2 | 2085 | 4 | GATAGCCATTTACTGCATAG |
| LCK | 2086 | 1 | GACCCACTGGTTACCTACGA |
| LCK | 2087 | 2 | GCCGGGAAAAGTGATTCGAG |
| LCK | 2088 | 3 | CTACAACGGGCACACGAAGG |
| LCK | 2089 | 4 | GCTGGTTCGGCTCTACGCTG |
| FOLR3 | 2090 | 1 | GAAGAAGAATGCCTGCTGCA |
| FOLR3 | 2091 | 2 | TGGCTTTGGTGACTGCTGCG |
| FOLR3 | 2092 | 3 | ACTCATACCTGCCGGATCCA |
| FOLR3 | 2093 | 4 | AACTTTAACTGGGATCACTG |
| PORCN | 2094 | 1 | TGCCGACATTCCTCCCATCG |
| PORCN | 2095 | 2 | GTGACATGGCACAAGATGCG |
| PORCN | 2096 | 3 | GGAGCTGCCTCGGTCAATGG |
| PORCN | 2097 | 4 | TAGCTGTGGAAGGATATCCA |
| APH1B | 2098 | 1 | GGTTTGAAGAGTATAAACCC |
| APH1B | 2099 | 2 | TCTTGCCATGAACCAAACAA |
| APH1B | 2100 | 3 | GAAGATGATACGCAACGGCT |
| APH1B | 2101 | 4 | TTGGGCTTTGGAATCATGAG |
| PARP2 | 2102 | 1 | CATGCAATGAATTCTACACC |
| PARP2 | 2103 | 2 | AATACCAAGAAAGCCCCACT |
| PARP2 | 2104 | 3 | GGGGGCGCAAGGCACAATGT |
| PARP2 | 2105 | 4 | TTGTTCAGGCAATCTCAACA |
| BCL2L2 | 2106 | 1 | GTGTGCTGAGAGTGTCAACA |
| BCL2L2 | 2107 | 2 | AGCCCAACAACGCTTCACCC |
| BCL2L2 | 2108 | 3 | ACTTTGTAGGTTATAAGCTG |
| BCL2L2 | 2109 | 4 | AGACAAAGAAGGCTACAAGG |
| CYP17A1 | 2110 | 1 | CCATACGAACCGAATAGATG |
| CYP17A1 | 2111 | 2 | ATCGCGTCCAACAACCGTAA |
| CYP17A1 | 2112 | 3 | TATGGACTGTCCGTTGTGGG |
| CYP17A1 | 2113 | 4 | CAATACCTCCTACAAGAATG |
| EIF4E | 2114 | 1 | AAAGCTTACCTGTTCTGTAG |
| EIF4E | 2115 | 2 | GAAGATGAGAAAAACAAACG |
| EIF4E | 2116 | 3 | TTCTCCTCTTCTGTAGTCGG |
| EIF4E | 2117 | 4 | AAACTTGGCAAGCAAACCTG |
| ESR1 | 2118 | 1 | TCAGATAATCGACGCCAGGG |
| ESR1 | 2119 | 2 | CTGACCGTAGACCTGCGCGT |
| ESR1 | 2120 | 3 | TACTCGGAATAGAGTATCGG |
| ESR1 | 2121 | 4 | TCCAGGTACACCTCGCCCAG |
| IDH2 | 2122 | 1 | GTCCTTGAAACGCCCATCGT |
| IDH2 | 2123 | 2 | CTTTAGCTGGATGTCCACGT |
| IDH2 | 2124 | 3 | GGGCATGTACAACACCGACG |
| IDH2 | 2125 | 4 | ACTTCGACAAGAATAAGATC |
| IDO1 | 2126 | 1 | ATCCCAGAACTAGACGTGCA |
| IDO1 | 2127 | 2 | ACCAGACCGTCTGATAGCTG |
| IDO1 | 2128 | 3 | GATACTTACTCATAAGTCAG |
| IDO1 | 2129 | 4 | AGAACGGGACACTTTGCTAA |
| NOTCH3 | 2130 | 1 | CACGCTGTGTGATCGCAACG |
| NOTCH3 | 2131 | 2 | GACACCGATGTCTCAATGGG |
| NOTCH3 | 2132 | 3 | GGTTGGTGCAGATACCATGA |
| NOTCH3 | 2133 | 4 | GACAGGACAGTCTGACAGCG |
| AKT2 | 2134 | 1 | TCTCGTCTGGAGAATCCACG |
| AKT2 | 2135 | 2 | GACCCCATGGACTACAAGTG |
| AKT2 | 2136 | 3 | GGGGGGTAGAGTCTGATCAG |
| AKT2 | 2137 | 4 | CTCTTGAGTACTTGCACTCG |
| AURKA | 2138 | 1 | CTTCGAATGACAGTAAGACA |
| AURKA | 2139 | 2 | CCATATAGAAAATAATCCTG |
| AURKA | 2140 | 3 | CCTGAAAACTCACCGAAGGT |
| AURKA | 2141 | 4 | TGCTTGCAAAGGAATGCGCT |
| PPP2CA | 2142 | 1 | AACGCATCACCATTCTTCGA |
| PPP2CA | 2143 | 2 | AAAAGAATCCAACGTGCAAG |
| PPP2CA | 2144 | 3 | AATAAAAGTCATACCTCATG |
| PPP2CA | 2145 | 4 | CTCGCCATCTATAGATACAC |
| DNMT1 | 2146 | 1 | GATTTCTGATGAAAAAGACG |
| DNMT1 | 2147 | 2 | GCTCTACTGGAGCGACGAGG |
| DNMT1 | 2148 | 3 | GAGGCAAAAAGAAATCCCCA |
| DNMT1 | 2149 | 4 | TCACCCAAAAAAATGCACCA |
| NTRK1 | 2150 | 1 | CCCTTTCGAGTTCAACCCCG |
| NTRK1 | 2151 | 2 | GCGCAGACACCCGTGCCGCA |
| NTRK1 | 2152 | 3 | AGGGCACAAGAACAGTGCAG |
| NTRK1 | 2153 | 4 | CTGGAGCTCCGTGATCTGAG |
| IFNAR2 | 2154 | 1 | TGAAAGTGATAGCGATACTG |
| IFNAR2 | 2155 | 2 | TGAGTGGAGAAGCACACACG |
| IFNAR2 | 2156 | 3 | CGTCATTGAAGAACAGTCAG |
| IFNAR2 | 2157 | 4 | ATATCCATGGCTTCCAACGG |
| MAPK8 | 2158 | 1 | TAGTGGATTTATGGTCTGTG |
| MAPK8 | 2159 | 2 | AGAATCAGACTCATGCCAAG |
| MAPK8 | 2160 | 3 | TGATATTAGATATTGATCAG |
| MAPK8 | 2161 | 4 | AGAAACTGCAACCAACAGTA |
| SMO | 2162 | 1 | CAAGAACTACCGATACCGTG |
| SMO | 2163 | 2 | GATTCTTGATCTCACAGTCA |
| SMO | 2164 | 3 | CCACATTCGTGGCTGACTGG |
| SMO | 2165 | 4 | CAAGTGTGAGAATGACCGGG |
| MAP3K8 | 2166 | 1 | ATCAGTCAGATATGGAACTG |
| MAP3K8 | 2167 | 2 | CTTCGGTCATTTGAACACTT |
| MAP3K8 | 2168 | 3 | CCAGGGGATCAGGAGAACAT |
| MAP3K8 | 2169 | 4 | TGACACATGGTCATTAGACT |
| TXN | 2170 | 1 | TACTTCAAGGAATATCACGT |
| TXN | 2171 | 2 | CACACTCTGAAGCAACATCC |
| TXN | 2172 | 3 | TAGTTGACTTCTCAGCCACG |
| TXN | 2173 | 4 | GGTGAAGCAGATCGAGAGCA |
| IDH1 | 2174 | 1 | ATGTAGATCCAATTCCACGT |
| IDH1 | 2175 | 2 | CCCATCCACTCACAAGCCGG |
| IDH1 | 2176 | 3 | CAAGCTATGAAATCAGAGGG |
| IDH1 | 2177 | 4 | TACCTTCAAAGTTATGTACC |
| GSK3A | 2178 | 1 | CCTCCCATAACTCTGACCGA |
| GSK3A | 2179 | 2 | GCCCGAGACAGTGTACCGGG |
| GSK3A | 2180 | 3 | TCAGCCTCACAATATTGCAG |
| GSK3A | 2181 | 4 | AGGAGACATTGGGCTCCCCT |
| PSMB9 | 2182 | 1 | GTAGATGCGCTCGTGCAGCG |
| PSMB9 | 2183 | 2 | CCAGACCCATTACCCCGGTG |
| PSMB9 | 2184 | 3 | TATCAGCTATAAATATCGAG |
| PSMB9 | 2185 | 4 | TCCCAGGGTTCCATATACCT |
| CD19 | 2186 | 1 | CTAGGTCCGAAACATTCCAC |
| CD19 | 2187 | 2 | GGAAAGTATTATTGTCACCG |
| CD19 | 2188 | 3 | ATGAAAAGCCAGATGGCCAG |
| CD19 | 2189 | 4 | AAGATGAAGAATGCCCACAA |
| ESR2 | 2190 | 1 | CCAGTTATCACATCTGTATG |
| ESR2 | 2191 | 2 | TCAGCCTGTTCGACCAAGTG |
| ESR2 | 2192 | 3 | CCCCAGTGCGCCCTTCACCG |
| ESR2 | 2193 | 4 | AGCAGGGCTATAGAATGTCA |
| FLT3 | 2194 | 1 | AAAGCTGTTCATGTGAACCA |
| FLT3 | 2195 | 2 | GGTGCTTTGCGATTCACAGG |
| FLT3 | 2196 | 3 | GTAACCAAAGCTGATTGACT |
| FLT3 | 2197 | 4 | GGGGTCTCAACGCACACCCG |
| MAP2K2 | 2198 | 1 | AAGCACCAGATCATGCACCG |
| MAP2K2 | 2199 | 2 | ACGGCGAGTTGCATTCGTGC |
| MAP2K2 | 2200 | 3 | GGCCCATCCCCTACCAGCGA |
| MAP2K2 | 2201 | 4 | GGATTCCCGAGGAGATCCTG |
| PGF | 2202 | 1 | CGTGTCCGAGTACCCCAGCG |
| PGF | 2203 | 2 | CCAGCGCCCGGCAGTAGCTG |
| PGF | 2204 | 3 | TGGGAACGGCTCGTCAGAGG |
| PGF | 2205 | 4 | GCTCCTAAAGATCCGTTCTG |
| ADORA2A | 2206 | 1 | GCGGCGGCCGACATCGCAGT |
| ADORA2A | 2207 | 2 | TGGCTTGGTGACCGGCACGA |
| ADORA2A | 2208 | 3 | ATGCTAGGTTGGAACAACTG |
| ADORA2A | 2209 | 4 | AAGCAGTTGATGATGTGTAG |
| CXCR1 | 2210 | 1 | CAGAACAGCATGACAAACAG |
| CXCR1 | 2211 | 2 | GAAATGACACAGCAAAATGG |
| CXCR1 | 2212 | 3 | CAGGCTCAGCAGGAACACTA |
| CXCR1 | 2213 | 4 | ACTGACCCAGAAGCGTCACT |
| AKT3 | 2214 | 1 | CTGCACCATAGAAACGTGTG |
| AKT3 | 2215 | 2 | ATTTCATGTAGATACTCCAG |
| AKT3 | 2216 | 3 | ACAAATTGATAATATAGGAG |
| AKT3 | 2217 | 4 | TATTTGAAACTACTAGGTAA |
| DPP4 | 2218 | 1 | GGATTCCAAACAACACACAG |
| DPP4 | 2219 | 2 | CTGCTGTGTAGAGTATAGAG |
| DPP4 | 2220 | 3 | CTACTTGTGTGATGTGACAT |
| DPP4 | 2221 | 4 | GAATATAAAGGAATGCCAGG |
| RET | 2222 | 1 | CGGCACAGCTCGTCGCACAG |
| RET | 2223 | 2 | CTAGATCGGGAAAGTCTGTG |
| RET | 2224 | 3 | TGCCGAACTTCACTACATGG |
| RET | 2225 | 4 | CCCGGTGACCGTGTACGACG |
| CHEK2 | 2226 | 1 | GGGCCCATAATCGAGCCCAG |
| CHEK2 | 2227 | 2 | AGGTAAAGCTGGCTTTCGAG |
| CHEK2 | 2228 | 3 | GCATACATAGAAGATCACAG |
| CHEK2 | 2229 | 4 | AGAGCTGTTTGACAAAGTGG |
| NAE1 | 2230 | 1 | TCAAAGAAGCAGTATCGGCA |
| NAE1 | 2231 | 2 | TAGCTAAATATTTAGCACAG |
| NAE1 | 2232 | 3 | CACAGCACTAAATACAACTC |
| NAE1 | 2233 | 4 | ATCATTATAAAAGAACATCC |
| HSP90AA1 | 2234 | 1 | GATCTGTCAAGCTTTCATAC |
| HSP90AA1 | 2235 | 2 | TCTCACGGGATATGTTTAGA |
| HSP90AA1 | 2236 | 3 | CAGTGAGGACAGACACAGGT |
| HSP90AA1 | 2237 | 4 | GATCAAAAGGAGCACGTCGT |
| TYK2 | 2238 | 1 | TGAATGACGTGGCATCACTG |
| TYK2 | 2239 | 2 | CAGGCGGCCCTCATACACGT |
| TYK2 | 2240 | 3 | AATACCTAGCCACACTCGAG |
| TYK2 | 2241 | 4 | TTGGGCCTGAGCATCGAAGA |
| ABL2 | 2242 | 1 | AACCTCTGTAATGACGACGG |
| ABL2 | 2243 | 2 | TGTACACCATCACTCCACAG |
| ABL2 | 2244 | 3 | TATCGAATGGAACAGCCTGA |
| ABL2 | 2245 | 4 | GGTTCAACATCACAACCATA |
| FGF1 | 2246 | 1 | TGAGCCGTATAAAAGCCCGT |
| FGF1 | 2247 | 2 | CTCCTCTACTGTAGCAACGG |
| FGF1 | 2248 | 3 | TTCCTGAGGATCCTTCCGGA |
| FGF1 | 2249 | 4 | AGAAGTTTAATCTGCCTCCA |
| ERBB3 | 2250 | 1 | ATGAGGCGATACTTGGAACG |
| ERBB3 | 2251 | 2 | TGTCGAAATTATAGCCGAGG |
| ERBB3 | 2252 | 3 | ATCATGTGAGACAACACCGG |
| ERBB3 | 2253 | 4 | ACCATTGCCCAACCTCCGCG |
| NTRK2 | 2254 | 1 | TGAATGGAATGCACCAGTGG |
| NTRK2 | 2255 | 2 | ACGTCACTGATAAAACCGGT |
| NTRK2 | 2256 | 3 | AACCTGCAGATACCCAATTG |
| NTRK2 | 2257 | 4 | TTGGTGATGCCAAAGTACTG |
| HDAC3 | 2258 | 1 | TCATCAATGCCATCCCGCAG |
| HDAC3 | 2259 | 2 | ACCTGGAGCACAATGCACGT |
| HDAC3 | 2260 | 3 | TGGGTCAATGCCAGGCGATG |
| HDAC3 | 2261 | 4 | GTCAGCCCCACCAATATGCA |
| B4GALNT1 | 2262 | 1 | CCCGTAGCCGATCATAACGG |
| B4GALNT1 | 2263 | 2 | GGATCAAGGAGCAAGTAGTG |
| B4GALNT1 | 2264 | 3 | TGGAGTTACTCTCACTGGAG |
| B4GALNT1 | 2265 | 4 | GCGCGTTAGTGGCCCCTACG |
| RBM39 | 2266 | 1 | TGGCGGCAAGAATTCGACCA |
| RBM39 | 2267 | 2 | TTGGCACGCCTAAAACTCGT |
| RBM39 | 2268 | 3 | GGACCTATGAGGCTTTATGT |
| RBM39 | 2269 | 4 | AAATTTAACAGTGCCATCCG |
| HDAC1 | 2270 | 1 | CATCCGTCCAGATAACATGT |
| HDAC1 | 2271 | 2 | TGAGTCATGCGGATTCGGTG |
| HDAC1 | 2272 | 3 | GCACCGGGCAACGTTACGAA |
| HDAC1 | 2273 | 4 | GGAGATGTTCCAGCCTAGTG |
| IL6R | 2274 | 1 | TGGAAACTATTCATGCTACC |
| IL6R | 2275 | 2 | ACTCACAAACAACATTGCTG |
| IL6R | 2276 | 3 | CCGTGGCCAGAAACCCCCGC |
| IL6R | 2277 | 4 | CCTGAGCACCCAGTGAACAG |
| BAX | 2278 | 1 | TCGGAAAAAGACCTCTCGGG |
| BAX | 2279 | 2 | GTTTCATCCAGGATCGAGCA |
| BAX | 2280 | 3 | AGTAGAAAAGGGCGACAACC |
| BAX | 2281 | 4 | GGACGAACTGGACAGTAACA |
| TOP1 | 2282 | 1 | CGACCATGAATATACTACCA |
| TOP1 | 2283 | 2 | TGGAAGAGGCTCATATGGTG |
| TOP1 | 2284 | 3 | ACTCACTCATCCTCATCTCG |
| TOP1 | 2285 | 4 | CAAACATAAAGACAGAGACA |
| EGFR | 2286 | 1 | TGTCACCACATAATTACCTG |
| EGFR | 2287 | 2 | GTGGAGCCTCTTACACCCAG |
| EGFR | 2288 | 3 | GTCTGCGTACTTCCAGACCA |
| EGFR | 2289 | 4 | TCTTGCCGGAATGTCAGCCG |
| RAD50 | 2290 | 1 | CTAGGAACGTGAGTTAAGCA |
| RAD50 | 2291 | 2 | AAGCGGCGTGATGAAATGCT |
| RAD50 | 2292 | 3 | AAACAGCACAAGTTAGACAC |
| RAD50 | 2293 | 4 | AAAAACTGCCAACCAACTGA |
| BLK | 2294 | 1 | CAGGTCCCGATCATTCATAG |
| BLK | 2295 | 2 | GCTGGTCCGACTCTACGCAG |
| BLK | 2296 | 3 | GCTTCTTGCTCCAATCAACA |
| BLK | 2297 | 4 | ACTCGGGCCACAAAGTTACT |
| GSK3B | 2298 | 1 | ATACCTTGACATAAATCACA |
| GSK3B | 2299 | 2 | CAGTATCAGGATCCAACAAG |
| GSK3B | 2300 | 3 | GTGGCTCCAAAGATCAACTC |
| GSK3B | 2301 | 4 | AGGTCCTGGGAACTCCAACA |
| MAPK3 | 2302 | 1 | GCAGTTGCAGTACATCGGCG |
| MAPK3 | 2303 | 2 | AGTAGGTCTGATGTTCGAAG |
| MAPK3 | 2304 | 3 | TTCCGCCATGAGAATGTCAT |
| MAPK3 | 2305 | 4 | TGGAGGGCTTTAGATCTCGG |
| MUC5AC | 2306 | 1 | GAAGCCGGGAACCTACTACT |
| MUC5AC | 2307 | 2 | CAAGATGTGCCTCAACTACG |
| MUC5AC | 2308 | 3 | CCGTTAATGACTTTGCCACG |
| MUC5AC | 2309 | 4 | GAGGTGAGCATTGAACACCT |
| NBN | 2310 | 1 | TTCCCGAACTTTGAAGTCGG |
| NBN | 2311 | 2 | AGAATGCACTCACCTTGTCA |
| NBN | 2312 | 3 | CCAGGACCAAGCCTTTCACA |
| NBN | 2313 | 4 | AGCAGCCTCCACAAATTGAA |
| DDR2 | 2314 | 1 | CCGTGACAAACCGAGCACTG |
| DDR2 | 2315 | 2 | GGGCTAGGCCAATTGACCGA |
| DDR2 | 2316 | 3 | GTAATTGATCTTGTACATGG |
| DDR2 | 2317 | 4 | AAGTTGATGACAGCAACACT |
| NOTCH2 | 2318 | 1 | TTGATGTCCATCTCACAACG |
| NOTCH2 | 2319 | 2 | CTGGGGACACACATCGACGA |
| NOTCH2 | 2320 | 3 | TTGTTGATATAATCCCAGCA |
| NOTCH2 | 2321 | 4 | CATTGGTGGATACAGATGCG |
| VDR | 2322 | 1 | ACAGCTCTAGGGTCACAGAA |
| VDR | 2323 | 2 | CCACACACCCCACAGATCCG |
| VDR | 2324 | 3 | CTGCCGGCTCAAACGCTGTG |
| VDR | 2325 | 4 | CCATCATTCACACGAACTGG |
| BMX | 2326 | 1 | GGTTAGAAATTCGAGCCAAG |
| BMX | 2327 | 2 | GGGAAGACTTCCCTGACTGG |
| BMX | 2328 | 3 | TGTTGGCCTTTGTTGACACA |
| BMX | 2329 | 4 | GGGGTTACCCCTTATCTCTG |
| ABL1 | 2330 | 1 | TCAGTGATGATATAGAACGG |
| ABL1 | 2331 | 2 | GGTTCATCATCATTCAACGG |
| ABL1 | 2332 | 3 | TTGCTCCCTCGAAAAGAGCG |
| ABL1 | 2333 | 4 | CTTAGGCTATAATCACAATG |
| ANGPT1 | 2334 | 1 | TTGCAATATGGATGTCAATG |
| ANGPT1 | 2335 | 2 | GCAGCTTGAGAATTACATTG |
| ANGPT1 | 2336 | 3 | AGATATAACCGGATTCAACA |
| ANGPT1 | 2337 | 4 | GCAGAGAGATGCTCCACACG |
| CRTC2 | 2338 | 1 | AGGGCCACTTACCCCCACGT |
| CRTC2 | 2339 | 2 | CTTCGCCAGCTAGACTCTGG |
| CRTC2 | 2340 | 3 | GAGGTTGGGATTGCTTAGGG |
| CRTC2 | 2341 | 4 | CCACCTGCCATGAACACGGG |
| CRBN | 2342 | 1 | ACCAATGTTCATATAAATGG |
| CRBN | 2343 | 2 | CTGACTGTGTTCTTAGCTCA |
| CRBN | 2344 | 3 | TGTATGTGATGTCGGCAGAC |
| CRBN | 2345 | 4 | TGAAGAGGTAATGTCTGTCC |
| IL1B | 2346 | 1 | CTTCGACACATGGGATAACG |
| IL1B | 2347 | 2 | GGTGGTCGGAGATTCGTAGC |
| IL1B | 2348 | 3 | CATGGCCACAACAACTGACG |
| IL1B | 2349 | 4 | CTGAAAGCTCTCCACCTCCA |
| TNFSF11 | 2350 | 1 | ACCCCGATCATGGTACCAAG |
| TNFSF11 | 2351 | 2 | ATTCTATTAGGATCCATCTG |
| TNFSF11 | 2352 | 3 | CATGAGCCATCCACCATCGC |
| TNFSF11 | 2353 | 4 | GGAGGGCCACGAACATGGAG |
| FZD8 | 2354 | 1 | CGGCGGTGGTTAGGTCGGTG |
| FZD8 | 2355 | 2 | GGCCTGCTACCTCTTCGTGT |
| FZD8 | 2356 | 3 | TAGCCGATGCCCTTACACAG |
| FZD8 | 2357 | 4 | ACACGCTCACCATAGGCGCG |
| TGFBR1 | 2358 | 1 | AGAACGTTCGTGGTTCCGTG |
| TGFBR1 | 2359 | 2 | TAAAAGGGCGATCTAATGAA |
| TGFBR1 | 2360 | 3 | GTTGTGTATAACTTTGTCTG |
| TGFBR1 | 2361 | 4 | ATGGGCAAGACCGCTCGCCG |
| FGF2 | 2362 | 1 | TCTCCCGGACCCCGTCAACT |
| FGF2 | 2363 | 2 | GCCACTTCAAGGACCCCAAG |
| FGF2 | 2364 | 3 | GGGTGCCAGATTAGCGGACG |
| FGF2 | 2365 | 4 | TTCACGGATGGGTGTCTCCG |
| DYRK4 | 2366 | 1 | TTGGATGTACGTGTATACTG |
| DYRK4 | 2367 | 2 | CAAAGACAACACCTACAATG |
| DYRK4 | 2368 | 3 | CTCCAGAACTTCATAGCGGT |
| DYRK4 | 2369 | 4 | TGAAGCCAAGAAGCTCGACA |
| IL2RA | 2370 | 1 | GGATACAGGGCTCTACACAG |
| IL2RA | 2371 | 2 | TGGCTTTGAATGTGGCGTGT |
| IL2RA | 2372 | 3 | TTGTTTCGTTGTGTTCCGAG |
| IL2RA | 2373 | 4 | CTGCAGGGAACCTCCACCAT |
| ARAF | 2374 | 1 | GCCCAACAAGCAACGCACGG |
| ARAF | 2375 | 2 | GTAGTGATGGAACCCCCCGG |
| ARAF | 2376 | 3 | TGGTCTACCGACTCATCAAG |
| ARAF | 2377 | 4 | AGTGTCCAGGATTTGTCCGG |
| MAPK14 | 2378 | 1 | TGATGAAATGACAGGCTACG |
| MAPK14 | 2379 | 2 | CACAAAAACGGGGTTACGTG |
| MAPK14 | 2380 | 3 | AAGTAACCGCAGTTCTCTGT |
| MAPK14 | 2381 | 4 | CAAGGCGAGTAATACCTGTC |
| CSF1R | 2382 | 1 | ACGCTACCTTCCAAAACACG |
| CSF1R | 2383 | 2 | GTTGGAAATCTACTTGATCG |
| CSF1R | 2384 | 3 | GCTGCCTTACAACGAGAAGT |
| CSF1R | 2385 | 4 | GCTTGCTAATGCTACCACCA |
| ROCK2 | 2386 | 1 | TGTTTAGGGAGGTACGACTT |
| ROCK2 | 2387 | 2 | ACCGGATTATATATCACCTG |
| ROCK2 | 2388 | 3 | AGCTGAACATAAGGCCACAA |
| ROCK2 | 2389 | 4 | TAGTAGGTAAATCCGATGAA |
| PRMT5 | 2390 | 1 | GGAGAAAAACCCAAATGCCG |
| PRMT5 | 2391 | 2 | GGTACTGAGAGTATTTGATG |
| PRMT5 | 2392 | 3 | GAAGATTCGCAGGAACTCCG |
| PRMT5 | 2393 | 4 | TGCACCAACTACACACACAG |
| FGFR3 | 2394 | 1 | CATCCGGCAGACGTACACGC |
| FGFR3 | 2395 | 2 | GGTGCTGAATGCCTCCCACG |
| FGFR3 | 2396 | 3 | AAGAACGGCAGGGAGTTCCG |
| FGFR3 | 2397 | 4 | CCCGAGACAGCTCCCATTTG |
| CSNK2A2 | 2398 | 1 | AGTTTACCTGATAGTCCACG |
| CSNK2A2 | 2399 | 2 | TGATATTTGTTCCACCACGA |
| CSNK2A2 | 2400 | 3 | TAGCAAGCATGATCTTTCGA |
| CSNK2A2 | 2401 | 4 | TGTGCATGATTCCCTTGCTG |
| SIRT1 | 2402 | 1 | CTCTGAGCCATACCTATCCG |
| SIRT1 | 2403 | 2 | GCGGCGGCGATTGGGTACCG |
| SIRT1 | 2404 | 3 | TCTGGTTTCATGATAGCAAG |
| SIRT1 | 2405 | 4 | ATAGCCTTGTCAGATAAGGA |
| FGFR1 | 2406 | 1 | GTTGCCCGCCAACAAAACAG |
| FGFR1 | 2407 | 2 | CTGGTCTTAGGCAAACCCCT |
| FGFR1 | 2408 | 3 | AGTTCAAATGCCCTTCCAGT |
| FGFR1 | 2409 | 4 | ACAGTGTGTACCTTCCAGAA |
| FRK | 2410 | 1 | CTATATTCCTTCTAACTACG |
| FRK | 2411 | 2 | AGTTGCGGTCTATCTCCCAT |
| FRK | 2412 | 3 | GCAGTGAAAACATTAAAACC |
| FRK | 2413 | 4 | CACTACACCAAGACAAGTGA |
| NAMPT | 2414 | 1 | GGGATGGAACTACATTCTTG |
| NAMPT | 2415 | 2 | CTGTTCCAGCAGCAGAACAC |
| NAMPT | 2416 | 3 | AATAGTATCAAGAAGTACAC |
| NAMPT | 2417 | 4 | CAGAGGAGTCTCTTCCCAAG |
| ERBB2 | 2418 | 1 | AACTACCTTTCTACGGACGT |
| ERBB2 | 2419 | 2 | TTGGGATCCTCATCAAGCGA |
| ERBB2 | 2420 | 3 | TCATCGCTCACAACCAAGTG |
| ERBB2 | 2421 | 4 | GTTACCTATACATCTCAGCA |
| CHD1 | 2422 | 1 | TTAATTCGCCTAAGAGAACG |
| CHD1 | 2423 | 2 | TTCCGATGACTCATCAAGTG |
| CHD1 | 2424 | 3 | AAGCAGCCATCCTATATTGG |
| CHD1 | 2425 | 4 | ATGCCCAATTTAGACCTCCA |
| CD38 | 2426 | 1 | TCTGGCCCATCAGTTCACAC |
| CD38 | 2427 | 2 | TCAGACCGTACCTTGCAACA |
| CD38 | 2428 | 3 | CTTGACGCATCGCGCCAGGA |
| CD38 | 2429 | 4 | TCGCGGTGGTCGTCCCGAGG |
| EPHA2 | 2430 | 1 | GAAGCCCCTGAAGACATACG |
| EPHA2 | 2431 | 2 | CACACACCCGTATGGCAAAG |
| EPHA2 | 2432 | 3 | TCACGGAGAAACCCTCGGTG |
| EPHA2 | 2433 | 4 | CTGGTGCGGGTCAGTCCGTG |
| TLR7 | 2434 | 1 | AATGGGGCATTATAACAACG |
| TLR7 | 2435 | 2 | CAGCTACTAGAGATACCGCA |
| TLR7 | 2436 | 3 | CAGTCTGTGAAAGGACGCTG |
| TLR7 | 2437 | 4 | GAAGATTATGTAATGGCGAG |
| PRKCE | 2438 | 1 | GCACCGCTTGTGGACCACGC |
| PRKCE | 2439 | 2 | GCCTTGTCATTTGACAACCG |
| PRKCE | 2440 | 3 | CCACGTTGGTCTCACATCGA |
| PRKCE | 2441 | 4 | ATGTGATCATCGATCTCTCA |
| EPHB4 | 2442 | 1 | GTGCCCGGAAGTACCCGACG |
| EPHB4 | 2443 | 2 | CTTCCGGGTGAGATGCTCCG |
| EPHB4 | 2444 | 3 | CTGCACGTCACACACTTCGT |
| EPHB4 | 2445 | 4 | TGTCTGACATCCGGGTGACG |
| TNFSF13B | 2446 | 1 | GCTGTCTTGCTGCCTCACGG |
| TNFSF13B | 2447 | 2 | CAAACTCACTTTCAGTCCCG |
| TNFSF13B | 2448 | 3 | TGTTTCCATCCTCCCACGGA |
| TNFSF13B | 2449 | 4 | TGGCTTCTCAGCTTTAAAAG |
| PSMB5 | 2450 | 1 | TTTGTACTGATACACCATGT |
| PSMB5 | 2451 | 2 | GCTTCATGGAACAACCACCC |
| PSMB5 | 2452 | 3 | CCGCTACCGGTGAACCAGCG |
| PSMB5 | 2453 | 4 | ATCTGTGGCTGGGATAAGAG |
| TNF | 2454 | 1 | TTGGAGTGATCGGCCCCCAG |
| TNF | 2455 | 2 | AGAGCTCTTACCTACAACAT |
| TNF | 2456 | 3 | GGAGCTGAGAGATAACCAGC |
| TNF | 2457 | 4 | GAGACACTTACTGACTGCCT |
| NOTCH4 | 2458 | 1 | ACACCCCTCCATTAACACAT |
| NOTCH4 | 2459 | 2 | GCTGCCATTGTATAGGCATG |
| NOTCH4 | 2460 | 3 | TGTGTCAGCCTGGCTATTCG |
| NOTCH4 | 2461 | 4 | GGAGGCCTCTGTGTCGACAG |
| FCGR1A | 2462 | 1 | CTGGGAGCAGCTCTACACAG |
| FCGR1A | 2463 | 2 | ATGGGCAGCAAGACCCTGCG |
| FCGR1A | 2464 | 3 | TGTGACATCCCCACTCCTGG |
| FCGR1A | 2465 | 4 | TCCAGCAGAGTCTTCACGGA |
| TUBB1 | 2466 | 1 | GCTGATCGAGAATGTCCTAG |
| TUBB1 | 2467 | 2 | GCTGACGACACCCACCTATG |
| TUBB1 | 2468 | 3 | TGTGGTGGAGCCCTACAACG |
| TUBB1 | 2469 | 4 | GCTCATGAACAAGATTAGAG |
| CCND3 | 2470 | 1 | CACTGGAAGTAGGAGGCGCG |
| CCND3 | 2471 | 2 | ACCAAGGCCTGTCGGTCACG |
| CCND3 | 2472 | 3 | ACACACGCACCCGCAACTGG |
| CCND3 | 2473 | 4 | CATGTGCAATCACAGCAGCC |
| SIK1 | 2474 | 1 | ATGGTCGTGACAGTACTCCA |
| SIK1 | 2475 | 2 | GCATCGAGTCACCAAAACGC |
| SIK1 | 2476 | 3 | CCGGGGACACTTACATGGCG |
| SIK1 | 2477 | 4 | CCCCTCAAAGACTTCCGGGG |
| PIK3CB | 2478 | 1 | AAAAATGCGCAAATTCAGCG |
| PIK3CB | 2479 | 2 | TGTAGCGTGGGTAAATACGA |
| PIK3CB | 2480 | 3 | AAAGAGCACTTGGTAATCGG |
| PIK3CB | 2481 | 4 | TAAAACCATCGTAAGCTCAG |
| HDAC5 | 2482 | 1 | ACGTTCACCCGTCACTAGTG |
| HDAC5 | 2483 | 2 | TATGCCCTGTACTTACAGTG |
| HDAC5 | 2484 | 3 | GCCGGGTGCGCTGTTACACA |
| HDAC5 | 2485 | 4 | AGGCCTGCTTAGCAAGTGCG |
| S1PR1 | 2486 | 1 | GTCCGGCATTACAACTACAC |
| S1PR1 | 2487 | 2 | ACAAGCTCACTCCCGCCCAG |
| S1PR1 | 2488 | 3 | TCTGCAGTACAGAATGACGA |
| S1PR1 | 2489 | 4 | CAATAAAATAGTACATGGGT |
| PRKCI | 2490 | 1 | TCAGAATCCATCTACCGTAG |
| PRKCI | 2491 | 2 | TGTCTCGAACCTCATTGCAA |
| PRKCI | 2492 | 3 | ATCTGCACAGACCGAATATG |
| PRKCI | 2493 | 4 | AGCAAGAATGCAGCCCAACA |
| RPL3 | 2494 | 1 | GGCTACGTGGAAACCCCTCG |
| RPL3 | 2495 | 2 | TGAGATGATCGACGTCATCG |
| RPL3 | 2496 | 3 | CCGTGTCATTGCCCACACCC |
| RPL3 | 2497 | 4 | CCACCGAGGCCTGCGCAAGG |
| PSMD2 | 2498 | 1 | AGCCCACTAGCCGATACTTG |
| PSMD2 | 2499 | 2 | GATGCTCGTGGAACGACTAG |
| PSMD2 | 2500 | 3 | GGAAATCGTCCCCTATAACA |
| PSMD2 | 2501 | 4 | CCTGTGGAATGATAGCAGTA |
| HDAC6 | 2502 | 1 | TGTGCTGAGTTCCATTACCG |
| HDAC6 | 2503 | 2 | AGGACACGCAGCGATCTAGG |
| HDAC6 | 2504 | 3 | GCTTCCAGTGCTGAGTACGT |
| HDAC6 | 2505 | 4 | CCTCTAGGATAAGGATAATG |
| RRM1 | 2506 | 1 | CTTGTACCCCAATTCCAATG |
| RRM1 | 2507 | 2 | CCTACCTAGAAAGTTGTGGG |
| RRM1 | 2508 | 3 | TGGCAAACACTCTCCCATGG |
| RRM1 | 2509 | 4 | GGATCTCTTCATGAAACGAG |
| CSNK2A1 | 2510 | 1 | CTAGTTGGTGAGGATAGCCA |
| CSNK2A1 | 2511 | 2 | AGTCACATGTGGTGGAATGG |
| CSNK2A1 | 2512 | 3 | AGACATTGTAAAAGACCCTG |
| CSNK2A1 | 2513 | 4 | GATTGATCATGAGCACAGAA |
| HCK | 2514 | 1 | ATCCGGACCCTGGACAACGG |
| HCK | 2515 | 2 | AATGGCCTCGTAATCATACA |
| HCK | 2516 | 3 | ATGTATTGCCTCCGACCTGG |
| HCK | 2517 | 4 | CCAGCTTGAGGGATTCCCGA |
| HDAC4 | 2518 | 1 | CTTACCCGTACCAGTAGCGA |
| HDAC4 | 2519 | 2 | GCATCAGCGTGTCATACACG |
| HDAC4 | 2520 | 3 | GGGGCTGACTTACCGCAGAG |
| HDAC4 | 2521 | 4 | GGAGCCCATTGAGAGCGATG |
| RXRG | 2522 | 1 | TGTGTTTAACCAGAGATCCG |
| RXRG | 2523 | 2 | GAGGCAGAATGTGCTACCAG |
| RXRG | 2524 | 3 | TACGCTTGGCCCATTCAACG |
| RXRG | 2525 | 4 | CTTCAAGAGGACGATAAGGA |
| RARB | 2526 | 1 | AAGCAGGGTTTGTACACTCG |
| RARB | 2527 | 2 | GTGGATTGACCCAAACCGAA |
| RARB | 2528 | 3 | AAGGCCGTCTGAGAAAGTCA |
| RARB | 2529 | 4 | GTGTTATTAATAAAGTCACC |
| KRAS | 2530 | 1 | AAGAGGAGTACAGTGCAATG |
| KRAS | 2531 | 2 | AGATATTCACCATTATAGGT |
| KRAS | 2532 | 3 | CTGAATTAGCTGTATCGTCA |
| KRAS | 2533 | 4 | GATGTACCTATGGTCCTAGT |
| TGFB1 | 2534 | 1 | GGTTTCCACCATTAGCACGC |
| TGFB1 | 2535 | 2 | TTGATGTCACCGGAGTTGTG |
| TGFB1 | 2536 | 3 | GGTGAAGCGGAAGCGCATCG |
| TGFB1 | 2537 | 4 | GAATGGTGGCCAGGTCACCT |
| INHBC | 2538 | 1 | TCTCACTTTCAAGGTCCAAG |
| INHBC | 2539 | 2 | CAGAGCTCAGTCATCCTGGG |
| INHBC | 2540 | 3 | AAGACGAGTCTGGTTGATGG |
| INHBC | 2541 | 4 | ACCTCCACGGGGTCCCACAG |
| CD274 | 2542 | 1 | GGTTCCCAAGGACCTATATG |
| CD274 | 2543 | 2 | ACTGCTTGTCCAGATGACTT |
| CD274 | 2544 | 3 | ACATGTCAGTTCATGTTCAG |
| CD274 | 2545 | 4 | CACCACCAATTCCAAGAGAG |
| KDM1A | 2546 | 1 | TGGAATAGCAGAGACTCCGG |
| KDM1A | 2547 | 2 | CTAAATAACTGTGAACTCGG |
| KDM1A | 2548 | 3 | TTTCTGAAACAGGATCGTGT |
| KDM1A | 2549 | 4 | TGAGAAGTCATCCGGTCATG |
| XPO1 | 2550 | 1 | AGTGAGCTCTCAAAAAACGT |
| XPO1 | 2551 | 2 | TAGTCGAATGGCTAAACCAG |
| XPO1 | 2552 | 3 | TCTCAGGGAAACTCTTATGG |
| XPO1 | 2553 | 4 | TCACACCAGCAATCTCAGTG |
| PIK3CG | 2554 | 1 | ACTTAACCCTCTCACAGCAG |
| PIK3CG | 2555 | 2 | TGGCGGCGGACTTCTACCAC |
| PIK3CG | 2556 | 3 | GAGAATACGTCCTCCACATG |
| PIK3CG | 2557 | 4 | TTGCCTCTACAAAAACTGTG |
| IL6ST | 2558 | 1 | TGAGTTGCATTGTGAACGAG |
| IL6ST | 2559 | 2 | TCTTAAATAGGTGCGATGCA |
| IL6ST | 2560 | 3 | AAACGAAGCTGTCTTAGAGT |
| IL6ST | 2561 | 4 | GATCTGATGTAACCTTCCCA |
| TYMS | 2562 | 1 | ATGTGCGCTTGGAATCCAAG |
| TYMS | 2563 | 2 | TCTACAGATTATTCAGGACA |
| TYMS | 2564 | 3 | TTCCAAGGGAGTGAAAATCT |
| TYMS | 2565 | 4 | ACCAAACGTGTGTTCTGGAA |
| ACPP (ACP3) | 2566 | 1 | ACTCCTTGGCTAGTACACTT |
| ACPP (ACP3) | 2567 | 2 | AAAGGCAGGTATAGCAACTG |
| ACPP (ACP3) | 2568 | 3 | CTACGACCCTTTATATTGTG |
| ACPP (ACP3) | 2569 | 4 | GCCATGAGGATTCCTTTATG |
| PIM3 | 2570 | 1 | GCTCCGTGATAAAGTCGAAG |
| PIM3 | 2571 | 2 | GGCTTCGGCACGGTCTACGC |
| PIM3 | 2572 | 3 | GACTGGTTCGAGCGGCCCGA |
| PIM3 | 2573 | 4 | ACGGTCTACACCGACTTCGA |
| MAP1A | 2574 | 1 | CAGGCTGCTTAGGAATAACG |
| MAP1A | 2575 | 2 | TGGAACAGGACACATACTGG |
| MAP1A | 2576 | 3 | ACACAAAGACCGTTGGCCAG |
| MAP1A | 2577 | 4 | TGTTGAACATAAGGCTCCGG |
| DYRK1B | 2578 | 1 | AGGCTCGCAAGTACTTTGAA |
| DYRK1B | 2579 | 2 | GATGAAGTACTATATAGGTG |
| DYRK1B | 2580 | 3 | CACAGAGAGCTTACGCAGCG |
| DYRK1B | 2581 | 4 | CATGACTACATCGTGCGCAG |
| BCL2L1 | 2582 | 1 | CAGGCGACGAGTTTGAACTG |
| BCL2L1 | 2583 | 2 | GACCCCAGTTTACCCCATCC |
| BCL2L1 | 2584 | 3 | CAGTGGCTCCATTCACCGCG |
| BCL2L1 | 2585 | 4 | CTCCGATTCAGTCCCTTCTG |
| FLT1 | 2586 | 1 | ACAGCCACAGTCCGGCACGT |
| FLT1 | 2587 | 2 | AGGTTGAGGGATACCATATG |
| FLT1 | 2588 | 3 | CTTACCATATATATGCACTG |
| FLT1 | 2589 | 4 | TGGCCACTGTGTGATCACTG |
| PSMB2 | 2590 | 1 | GAGGAGGTTCACATGATATG |
| PSMB2 | 2591 | 2 | TTTATAAGATGCGAAATGGT |
| PSMB2 | 2592 | 3 | AAGATATTACTCCTGTGTGT |
| PSMB2 | 2593 | 4 | AGGGCCAGCGCTGTATTACA |
| CCND2 | 2594 | 1 | ATGTGCTCAATGAAGTCATG |
| CCND2 | 2595 | 2 | TGAAGGTCTGAGCATGCTTG |
| CCND2 | 2596 | 3 | ACTCCCATTATAGGTCTGTG |
| CCND2 | 2597 | 4 | CACTTGAAGTAGGAGCACTG |
| CDK6 | 2598 | 1 | GCCCGCGACTTGAAGAACGG |
| CDK6 | 2599 | 2 | AACACTCCAGAGATCCACGG |
| CDK6 | 2600 | 3 | TGGCTCACCTGACCACGTTG |
| CDK6 | 2601 | 4 | CATTGCAGGTCGTCACGCTG |
| KDR | 2602 | 1 | TAATGTACACGACTCCATGT |
| KDR | 2603 | 2 | CCAATCACACAATTAAAGCG |
| KDR | 2604 | 3 | CAGCCTCTGCCAATCCATGT |
| KDR | 2605 | 4 | CAAGAACTGAACTAAATGTG |
| BRD4 | 2606 | 1 | AGTCGATTTCAATCTCGTCG |
| BRD4 | 2607 | 2 | AGTCGAACTGTCACTGTCCG |
| BRD4 | 2608 | 3 | CCAGACCCCTGTCATGACAG |
| BRD4 | 2609 | 4 | CACCAAACTCCTGAGCATCA |
| CCND1 | 2610 | 1 | GTGTTCAATGAAATCGTGCG |
| CCND1 | 2611 | 2 | GGTTGGCATCGGGGTACGCG |
| CCND1 | 2612 | 3 | CGTGCCTCCGTAGGTCTGCG |
| CCND1 | 2613 | 4 | AGAGGCCACGAACATGCAAG |
| LAP3 | 2614 | 1 | CTCCACCGCAGACATGACGA |
| LAP3 | 2615 | 2 | AAGTGCTAGTAGTAAAACCG |
| LAP3 | 2616 | 3 | TGTCGGCAAAGCTCTATGGA |
| LAP3 | 2617 | 4 | GACCTCATGAGGGCTGACAT |
| PSMB8 | 2618 | 1 | CCAGAGCTCGCTTTACCCCG |
| PSMB8 | 2619 | 2 | AAGGAACGTTCAGATTGAGA |
| PSMB8 | 2620 | 3 | ACTAATGTAGGACCCAGCTG |
| PSMB8 | 2621 | 4 | TGGAGAACGTATTTCAGTGT |
| EZH2 | 2622 | 1 | ATGTTGGGGGTACATTCAGG |
| EZH2 | 2623 | 2 | TTATCAGAAGGAAATTTCCG |
| EZH2 | 2624 | 3 | TTATGATGGGAAAGTACACG |
| EZH2 | 2625 | 4 | CTTCTGTGAGCTCATTGCGC |
| HPRT1 | 2626 | 1 | AATAAATCAAGGTCATAACC |
| HPRT1 | 2627 | 2 | CTGTCCATAATTAGTCCATG |
| HPRT1 | 2628 | 3 | ACTAGAATGACCAGTCAACA |
| HPRT1 | 2629 | 4 | CACAGAGGGCTACAATGTGA |
| NPEPPS | 2630 | 1 | GTGATAGGGACCATCCACTG |
| NPEPPS | 2631 | 2 | GTCCGTGTTTACACTCCTGT |
| NPEPPS | 2632 | 3 | GAAAGTTTAGAAAATGCTAG |
| NPEPPS | 2633 | 4 | GCAAAGGCTGTAGTTGATGG |
| CDK4 | 2634 | 1 | CCAGATGGCACTTACACCCG |
| CDK4 | 2635 | 2 | AGTGTGAGAGTCCCCAATGG |
| CDK4 | 2636 | 3 | GTCCACATATGCAACACCTG |
| CDK4 | 2637 | 4 | GTCTACATGCTCAAACACCA |
| FYN | 2638 | 1 | ACGGGGACCTTGCGTACGAG |
| FYN | 2639 | 2 | TGGATACTACATTACCACCC |
| FYN | 2640 | 3 | GTCCCCCGAATCATTCCTTG |
| FYN | 2641 | 4 | TTGTCCTTTGGAAACCCAAG |
| RPS6KB1 | 2642 | 1 | CTCTTAGCCCCCATTCACTG |
| RPS6KB1 | 2643 | 2 | AATGAAAGCATGGACCATGG |
| RPS6KB1 | 2644 | 3 | CTTCGGGTACTTGGTAAAGG |
| RPS6KB1 | 2645 | 4 | AGCAGAACGGAATATTCTGG |
| CRTC1 | 2646 | 1 | TGTCAGTGGACAAACACGGA |
| CRTC1 | 2647 | 2 | AAATCCCAGTACCTGCAACT |
| CRTC1 | 2648 | 3 | GGTACCGTGACTGCAAGCGG |
| CRTC1 | 2649 | 4 | GCGGCCAACCTGACGCACCT |
| PTK2 | 2650 | 1 | TCTGATGATAAATGACTGCG |
| PTK2 | 2651 | 2 | ATGTGGGAGATACTGATGCA |
| PTK2 | 2652 | 3 | ACTTAAAGCTCAGCTCAGGT |
| PTK2 | 2653 | 4 | AGAGCAAAAGATTTGTACAC |
| FNTA | 2654 | 1 | TCACAAACCCGTCGTCCATG |
| FNTA | 2655 | 2 | ATGCAGCCAATTATACAGTG |
| FNTA | 2656 | 3 | ATAGGCGAGTATTAGTGGAA |
| FNTA | 2657 | 4 | TGTGGACCAACTTCTGAAAG |
| RARA | 2658 | 1 | GTGTAGCTCTCAGAGCACTC |
| RARA | 2659 | 2 | CTTCAAAGCACTTCTGCAGT |
| RARA | 2660 | 3 | AGAGTCCACCCAGCATAGGG |
| RARA | 2661 | 4 | AAGCAAGGCTTGTAGATGCG |
| PRLR | 2662 | 1 | CCATGAATGATACAACCGTG |
| PRLR | 2663 | 2 | TGTCCAGACTACATAACCGG |
| PRLR | 2664 | 3 | AAGACAGAAAACCCTACCTG |
| PRLR | 2665 | 4 | AATGGACTGACATTAGATGC |
| ALK | 2666 | 1 | CCATACCTTAAATACGTAGG |
| ALK | 2667 | 2 | CTGTAGCACTTTCAGAAGCG |
| ALK | 2668 | 3 | TCCAGACAACCCATTTCGAG |
| ALK | 2669 | 4 | CTCTATTGCAGTTAGCGGAG |
| CXCR4 | 2670 | 1 | TGACATGGACTGCCTTGCAT |
| CXCR4 | 2671 | 2 | TCTTCTGGTAACCCATGACC |
| CXCR4 | 2672 | 3 | CATCTTTGCCAACGTCAGTG |
| CXCR4 | 2673 | 4 | ACACCGAGGAAATGGGCTCA |
| RICTOR | 2674 | 1 | GGCATAGTCGCAAACATCTG |
| RICTOR | 2675 | 2 | TCTCCAAGGTGGGATAACGC |
| RICTOR | 2676 | 3 | GTGCCAAATAATTATCCATG |
| RICTOR | 2677 | 4 | TGTATAGGCAGGTAGACGTG |
| MDM2 | 2678 | 1 | GAGAACATTACCGGATTCGA |
| MDM2 | 2679 | 2 | TACCATGATCTACAGGAACT |
| MDM2 | 2680 | 3 | AGACACTTATACTATGAAAG |
| MDM2 | 2681 | 4 | CAACATCTGTTGCAATGTGA |
| SHH | 2682 | 1 | CTCACCCGCAGAGAACTCGG |
| SHH | 2683 | 2 | AGTGGCCAGGAGTGAAACTG |
| SHH | 2684 | 3 | GCGCCAGCGGAAGGTATGAA |
| SHH | 2685 | 4 | TGTGGCGCCGCACAACGACT |
| SSTR5 | 2686 | 1 | AGGCGGTGACAACAGGACGC |
| SSTR5 | 2687 | 2 | ACGTCCGCGAACACCAGGAG |
| SSTR5 | 2688 | 3 | GAAGGACGCGGCGTTCTGCG |
| SSTR5 | 2689 | 4 | GAGAATGTAGATGTTGGTGA |
| TUBE1 | 2690 | 1 | ATTTGCTCCTCAACCTAACG |
| TUBE1 | 2691 | 2 | ACTTTCCAGAATTCACCATG |
| TUBE1 | 2692 | 3 | ACATCTGTCAGTGTATACAG |
| TUBE1 | 2693 | 4 | TTTATAATACATTCCATGGG |
| KIT | 2694 | 1 | TCAGACTTAATAGTCCGCGT |
| KIT | 2695 | 2 | GAAAGAAGACAACGACACGC |
| KIT | 2696 | 3 | GAATGGCATGCTCCAATGTG |
| KIT | 2697 | 4 | TCTAGTGCATTCAAGCACAA |
| AGXT | 2698 | 1 | GCTGCTGTTCTTAACCCACG |
| AGXT | 2699 | 2 | CCCCTTTACATGGACCGGCA |
| AGXT | 2700 | 3 | CCGATGACCAAGGACCCTGG |
| AGXT | 2701 | 4 | GTCACTGAAGGAGATGAGCG |
| NOTCH1 | 2702 | 1 | TGCAGGTCAGTACTGTACCG |
| NOTCH1 | 2703 | 2 | TCCTGCCAGAACACCCACGG |
| NOTCH1 | 2704 | 3 | TCGCACGCCTCCTCGATCAG |
| NOTCH1 | 2705 | 4 | TTGACGTCGATCTCGCATCG |
| YES1 | 2706 | 1 | CTAGTCGCAAAGATTCTCGA |
| YES1 | 2707 | 2 | TCCAAAAGGCGTTACCCCTG |
| YES1 | 2708 | 3 | AAATTGGTGAAACACTACAC |
| YES1 | 2709 | 4 | AGAGAGAGTGAAACAACTAA |
| CYP19A1 | 2710 | 1 | TGATAGCAGAAAAAAGACGC |
| CYP19A1 | 2711 | 2 | CAGCATGACACGACGCAGAA |
| CYP19A1 | 2712 | 3 | GAGGGCACATCCTCAATACC |
| CYP19A1 | 2713 | 4 | GCATGAATTCTCCATATACC |
| TEK | 2714 | 1 | TGGCACAGGAACACCCATAG |
| TEK | 2715 | 2 | AGACCACTCTAAATTTGACC |
| TEK | 2716 | 3 | GCCTGAAACAGCATACCAGG |
| TEK | 2717 | 4 | TACTCGGCCAGGTATATAGG |
| TNFRSF8 | 2718 | 1 | GTGTCCCTTAGACGACCTCG |
| TNFRSF8 | 2719 | 2 | AGCTGCTTCTAAACTGACGA |
| TNFRSF8 | 2720 | 3 | ATCCAGAACGGGCTTCCCCG |
| TNFRSF8 | 2721 | 4 | GATGTGGCACAGATCATGCC |
| HSPB1 | 2722 | 1 | TGCCGGAGGAGTGGTCGCAG |
| HSPB1 | 2723 | 2 | CTCGGAGATCCGGCACACTG |
| HSPB1 | 2724 | 3 | TGGTCGAAGAGGCGGCTATG |
| HSPB1 | 2725 | 4 | CACTGCGGGGCTCTCGATGG |
| WEE1 | 2726 | 1 | TCATCAACAGAGCCCGCCAA |
| WEE1 | 2727 | 2 | CCATGAAGAGAGAACTACCC |
| WEE1 | 2728 | 3 | CCAGGAGATGCGTCGCCGCG |
| WEE1 | 2729 | 4 | TCTACGACGACACTGTCCTG |
| RXRB | 2730 | 1 | GGACAACAAAGACTGCACAG |
| RXRB | 2731 | 2 | ACGGCTATGTGCAATCTGCG |
| RXRB | 2732 | 3 | GCCCTGGCTGGATCCCGCAG |
| RXRB | 2733 | 4 | GTGGCTTCACATCTTCAGGG |
| INHBE | 2734 | 1 | GCACAGTTACTGGACAACCG |
| INHBE | 2735 | 2 | CTCACCCCTCAAGCCACTAG |
| INHBE | 2736 | 3 | GGGCACTGGTGCGAGCACAG |
| INHBE | 2737 | 4 | CCCTCCGGAGACTACAGCCA |
| AURKB | 2738 | 1 | ATTCTAGAGTATGCCCCCCG |
| AURKB | 2739 | 2 | TCTTTCCGGAGGACTCGCTG |
| AURKB | 2740 | 3 | CATCAACCCATACTGCAGGT |
| AURKB | 2741 | 4 | TGACGAGCAGCGAACAGCCA |
| AKT1 | 2742 | 1 | GAAGGTGCGTTCGATGACAG |
| AKT1 | 2743 | 2 | CCTGCACTCGGAGAAGAACG |
| AKT1 | 2744 | 3 | TGTTGAGGGGAGCCTCACGT |
| AKT1 | 2745 | 4 | TGTCATGGAGTACGCCAACG |
| LYN | 2746 | 1 | TGAAAGACAAGTCGTCCGGG |
| LYN | 2747 | 2 | GCTCGTGAGGCTCTACGCTG |
| LYN | 2748 | 3 | TTACTATAACAACAGTACCA |
| LYN | 2749 | 4 | TAATAACATCACCATGCACA |
| SSTR2 | 2750 | 1 | GGAGCCCACTCGGATTCCAG |
| SSTR2 | 2751 | 2 | CATCGACCGATACCTGGCTG |
| SSTR2 | 2752 | 3 | TGGTCTTCATCTTGGCATAG |
| SSTR2 | 2753 | 4 | AGCCCAGCATATATCATGAT |
| MAPK9 | 2754 | 1 | AGTACCGTGTCACCACGTAA |
| MAPK9 | 2755 | 2 | CCGGGAACAGGACTTTATGG |
| MAPK9 | 2756 | 3 | AGAAACTTCAGCCAACTGTG |
| MAPK9 | 2757 | 4 | CTTATGTCAGGTTATTCACA |
| AXL | 2758 | 1 | CTGAGAACATTAGTGCTACG |
| AXL | 2759 | 2 | CGAAGCCCATAACGCCAAGG |
| AXL | 2760 | 3 | CCTAGCAGTACATACCACCA |
| AXL | 2761 | 4 | CCCGAAGCCAATGTACCTCG |
| XIAP | 2762 | 1 | ATGACAACTAAAGCACCGCA |
| XIAP | 2763 | 2 | ATGGATATACTCAGTTAACA |
| XIAP | 2764 | 3 | TCTGACCAGGCACGATCACA |
| XIAP | 2765 | 4 | TATCAGACACCATATACCCG |
| BRD3 | 2766 | 1 | CATCACTGCAAACGTCACGT |
| BRD3 | 2767 | 2 | GATGCTATCCAAGAAGCACG |
| BRD3 | 2768 | 3 | ATACAATCCCCCAGACCACG |
| BRD3 | 2769 | 4 | TGAAGGTACACAGCAAGTGG |
| TOP2B | 2770 | 1 | TAGGCTACATGGCTTACCAG |
| TOP2B | 2771 | 2 | GTGTACACTGATATTAACAG |
| TOP2B | 2772 | 3 | ATGATTATGACCGATCAGGT |
| TOP2B | 2773 | 4 | ATCAACGTGTAGAGCCTGAG |
| SH2B3 | 2774 | 1 | ACTACCGGGACACAGGCCGT |
| SH2B3 | 2775 | 2 | GGAGCTCTTCGACCCACCCA |
| SH2B3 | 2776 | 3 | TGAGTTGCACGCCGTAGCGG |
| SH2B3 | 2777 | 4 | GCAGCAGCTGAATTCATGGA |
| DHH | 2778 | 1 | CCGCAACCACGTCCACGTGT |
| DHH | 2779 | 2 | CAGGATTCACTCCACTACGA |
| DHH | 2780 | 3 | AGGAAGAGCAGCACCGGCGT |
| DHH | 2781 | 4 | GAAATGCAACTGTGCGCCTG |
| DYRK2 | 2782 | 1 | TTGAGGATAACAGTAACAAG |
| DYRK2 | 2783 | 2 | CTAAATGCTAAGAAGCGCCA |
| DYRK2 | 2784 | 3 | ACAGCATTCATAGACGGCAG |
| DYRK2 | 2785 | 4 | CAAGCACTGCAGAATCGAGT |
| FLT4 | 2786 | 1 | GCCCTCCAGTCACGGCACTG |
| FLT4 | 2787 | 2 | CTCACCTCTCACGAACACGT |
| FLT4 | 2788 | 3 | CATCGAATCCAAGCCATCCG |
| FLT4 | 2789 | 4 | CATACCATGCACAATGACCT |

TABLE 6C
Library of gene modulatory reagents.

| Target gene | SEQ ID NO | gRNA # | gRNA Seq |
|---|---|---|---|
| CTRL-non-1 | 2790 | 1 | CCCGATGGACTATACCGAAC |
| CTRL-non-2 | 2791 | 1 | TCAATTCTCACTCACGACCA |
| CTRL-non-3 | 2792 | 1 | GTTGATCGAAAATGGGAGAA |
| CTRL-non-4 | 2793 | 1 | CGTCCCTTCGTCTCTGCTTA |
| CTRL-non-5 | 2794 | 1 | AATCGACTCGAACTTCGTGT |
| CTRL-non-6 | 2795 | 1 | AGCTCGCCATGTCGGTTCTC |
| CTRL-non-7 | 2796 | 1 | CAGAGACAATGACATGTAGA |
| CTRL-non-8 | 2797 | 1 | AACCACGGCATTGAGAGGTG |
| CTRL-non-9 | 2798 | 1 | CAAATACAATTACTTATAGC |
| CTRL-non-10 | 2799 | 1 | CGACTAACCGGAAACTTTTT |
| CTRL-non-11 | 2800 | 1 | CAAAAGTCTCGCTTGGTCCT |
| CTRL-non-12 | 2801 | 1 | CAGTAGCGATCGAATGTCAA |
| CTRL-non-13 | 2802 | 1 | AGTATTAGGTACCTGCCCTA |
| CTRL-non-14 | 2803 | 1 | CTGGCTTATTAGCTATAAAG |
| CTRL-non-15 | 2804 | 1 | AATATTTGGCTCGGCTGCGC |
| CTRL-non-16 | 2805 | 1 | GCTTTCAATTGCAAAAATAC |
| CTRL-non-17 | 2806 | 1 | ATACTCTCACAGGTACATAA |
| CTRL-non-18 | 2807 | 1 | GCAAATTCAGACAGCTAATT |
| CTRL-non-19 | 2808 | 1 | TCGCGCTTGGGTTATACGCT |
| CTRL-non-20 | 2809 | 1 | CCTACGCGGTAGGGAACTTT |
| CTRL-non-21 | 2810 | 1 | GACCGCAAAGTGGTCCGAAG |
| CTRL-non-22 | 2811 | 1 | GCTGTTCCGAAGTTGAGAAT |
| CTRL-non-23 | 2812 | 1 | CGCGTGTAGCTGGAGACAAG |
| CTRL-non-24 | 2813 | 1 | CGCGGCCCACGCGTCATCGC |
| CTRL-non-25 | 2814 | 1 | TCCTGCCAAGAAACACCCTT |
| CTRL-non-26 | 2815 | 1 | AAATTGGCTTTCGTTCGTGC |
| CTRL-non-27 | 2816 | 1 | TAAGGCGACCTGCGCTTGTG |
| CTRL-non-28 | 2817 | 1 | TCGCGGACATAGGGCTCTAA |
| CTRL-non-29 | 2818 | 1 | CGGTTTACATCTGCCCATCG |
| CTRL-non-30 | 2819 | 1 | CGATGGATCCCTAGTTCCTG |
| CTRL-non-31 | 2820 | 1 | CGAACTTAATCCCGTGGCAA |
| CTRL-non-32 | 2821 | 1 | GTTCATTTCCAAGTCCGCTG |
| CTRL-non-33 | 2822 | 1 | GTTTTCAGTTGCCCAACAGC |
| CTRL-non-34 | 2823 | 1 | CCTGCGGTGCACGGCTAGCC |
| CTRL-non-35 | 2824 | 1 | GGGCGCTAAGATATATGCCC |
| CTRL-non-36 | 2825 | 1 | CAAACAGTCTAAGGCGACGA |
| CTRL-non-37 | 2826 | 1 | TGCCCACTTAGCAACACTCT |
| CTRL-non-38 | 2827 | 1 | AACGCTGTCGTACGTGTATA |
| CTRL-non-39 | 2828 | 1 | GCCGCCGATTTCATAAGTAA |
| CTRL-non-40 | 2829 | 1 | ACGCATGCTTCCCAAAGCGT |
| CTRL-non-41 | 2830 | 1 | AAGCACTAGTCCGTATGATG |
| CTRL-non-42 | 2831 | 1 | TAGTCTCACCTGATGGCGTG |
| CTRL-non-43 | 2832 | 1 | AGAAGAAAAAAATGTCTACG |
| CTRL-non-44 | 2833 | 1 | TCTGGCTTGACACGACCGTT |
| CTRL-non-45 | 2834 | 1 | TCTATTTTGTCTGCGCAGAA |
| CTRL-non-46 | 2835 | 1 | CGAGCAAAGATTGTTGGATA |
| CTRL-non-47 | 2836 | 1 | TTCTTAGAAGTTGCTCCACG |
| CTRL-non-48 | 2837 | 1 | TAATCACATTGCTTAACCGG |
| CTRL-non-49 | 2838 | 1 | GGAGAGGGCCCGCGAACTCA |
| CTRL-non-50 | 2839 | 1 | ACCCATATATGCTGCCGCAC |
| CTRL-non-51 | 2840 | 1 | CGGGATGCAGCTGGAGAGGA |
| CTRL-non-52 | 2841 | 1 | GTCCTCATCCGGTCAGGCTG |
| CTRL-non-53 | 2842 | 1 | AAATACAAGCTATAGCGATA |
| CTRL-non-54 | 2843 | 1 | GCGATCGGAGTGCCACGATA |
| CTRL-non-55 | 2844 | 1 | AGCGATTCACGTATTAGATG |
| CTRL-non-56 | 2845 | 1 | GAGTAATTTCGAACGTATTG |
| CTRL-non-57 | 2846 | 1 | TTCTTCGGCCTACACCCGGT |
| CTRL-non-58 | 2847 | 1 | GTACCCCTATGGCCGTTCTA |
| CTRL-non-59 | 2848 | 1 | ATAGCGGATGTCCTTGGAAA |
| CTRL-non-60 | 2849 | 1 | CGTGTTTGGAATTTGCCGCG |
| CTRL-non-61 | 2850 | 1 | GCCACACGAATCATAAAGAG |
| CTRL-non-62 | 2851 | 1 | ACTTACGGCACTCGCATGCC |
| CTRL-non-63 | 2852 | 1 | GAGACCACTTTCGTGCAAGC |
| CTRL-non-64 | 2853 | 1 | TGCCGCTATACTAAAACCTT |
| CTRL-non-65 | 2854 | 1 | ATCTCTATACTGTCACTCGC |
| CTRL-non-66 | 2855 | 1 | TCATCTTACATCTGGGAGAC |
| CTRL-non-67 | 2856 | 1 | TGAACGGTGAAGAGATAGGG |
| CTRL-non-68 | 2857 | 1 | CTTCCTGCGTGGCTTTAAAC |
| CTRL-non-69 | 2858 | 1 | AAACGAGATCGAGAAAGGTA |
| CTRL-non-70 | 2859 | 1 | GAGCAGCTGTCAGGTCTTGT |
| CTRL-non-71 | 2860 | 1 | GGTACTGGAAGTCCGAAACC |
| CTRL-non-72 | 2861 | 1 | AGGCCACAAATTGTATACAG |
| CTRL-non-73 | 2862 | 1 | CCCTTCTGGCGGGCCAAACA |
| CTRL-non-74 | 2863 | 1 | TCAACCCCAGCGCACCGTTG |
| CTRL-non-75 | 2864 | 1 | TCGAGAGGAAAAACACACTG |
| CTRL-non-76 | 2865 | 1 | GGCGCATTAAAGTCGAGAGC |
| CTRL-non-77 | 2866 | 1 | GGAGATGCGGCCTTCTCAAA |
| CTRL-non-78 | 2867 | 1 | CCGCTGTCTCACTAATCTCA |
| CTRL-non-79 | 2868 | 1 | AGCATTCTCACCAAGACCGA |
| CTRL-non-80 | 2869 | 1 | GACTTCTAGAATATAAAAGA |
| CTRL-non-81 | 2870 | 1 | CTGGTGACCGACAATTACAC |
| CTRL-non-82 | 2871 | 1 | ATAGCCGCCGCTCATTACTT |
| CTRL-non-83 | 2872 | 1 | TACCCTCCGGATACGGACTG |
| CTRL-non-84 | 2873 | 1 | CTGCCCCAGGCGTAATCCTC |
| CTRL-non-85 | 2874 | 1 | TACGTAAGTGACGACAGGAA |
| CTRL-non-86 | 2875 | 1 | CAGCGCCGAAACTCTTTCCG |
| CTRL-non-87 | 2876 | 1 | CGCTTCCGCGGCCCGTTCAA |
| CTRL-non-88 | 2877 | 1 | TAAGCCTCATGAAGGAGGGG |
| CTRL-non-89 | 2878 | 1 | ACAGCGCTCTCGTGTACTAT |
| CTRL-non-90 | 2879 | 1 | AGTCTTAAAGACCCTAAGCT |
| CTRL-non-91 | 2880 | 1 | CTTAAGTCATGAGCAAAGAT |
| CTRL-non-92 | 2881 | 1 | GTTACGTACCCTCCAACTTC |
| CTRL-non-93 | 2882 | 1 | GGATATTGAGTAAACCCGAT |
| CTRL-non-94 | 2883 | 1 | CGACGCTAGGTAACGTAGAG |
| CTRL-non-95 | 2884 | 1 | GAGAAGGATGGAAATTAGAA |
| CTRL-non-96 | 2885 | 1 | CTCCGTTATGTGGCATGAGA |
| CTRL-non-97 | 2886 | 1 | GGGCCTACGATCAGAGGTGT |
| CTRL-non-98 | 2887 | 1 | TCTAAAGCCGTCCTGATGTT |
| CTRL-non-99 | 2888 | 1 | AAGGCGCGCGAATGTGGCAG |
| CTRL-non-100 | 2889 | 1 | GAACGTAGAAATTCCCATTT |
| Ctrl-hg38-1 | 2890 | 1 | GCCCAGTGGGTCCTCGTGAC |
| Ctrl-hg38-2 | 2891 | 1 | TTGACATCAGAAACAGACGT |
| Ctrl-hg38-3 | 2892 | 1 | TGTCATGGTTTGACTGTCCC |
| Ctrl-hg38-4 | 2893 | 1 | GGCTCGGGATCCCTAGCAGG |
| Ctrl-hg38-5 | 2894 | 1 | GTGTTGGATAAGTAATGGGG |
| Ctrl-hg38-6 | 2895 | 1 | GGATATTTGAGCTCATCTCT |
| Ctrl-hg38-7 | 2896 | 1 | GATACATTATAAGGAGCATT |
| Ctrl-hg38-8 | 2897 | 1 | ATAATTAGTTTTGAGAATAG |
| Ctrl-hg38-9 | 2898 | 1 | TGAGGGACATTCATCCGGCC |
| Ctrl-hg38-10 | 2899 | 1 | GAGAACCAAGGATGGCTTAT |
| Ctrl-hg38-11 | 2900 | 1 | TGCACTATTTCATGGTGATA |
| Ctrl-hg38-12 | 2901 | 1 | CGTTTTAAACTTGCAAGGTA |
| Ctrl-hg38-13 | 2902 | 1 | ACCGGCTTCAACTCCTTCAG |
| Ctrl-hg38-14 | 2903 | 1 | CATAGACCAATCAGCACTTT |
| Ctrl-hg38-15 | 2904 | 1 | CTTGGGCATTTATGTCTCCA |
| Ctrl-hg38-16 | 2905 | 1 | AATAATATTTCCCTGCACTC |
| Ctrl-hg38-17 | 2906 | 1 | CTGGAAAAGTTTAGCAATCA |
| Ctrl-hg38-18 | 2907 | 1 | TTAGTCACAGTCCCCTACCT |
| Ctrl-hg38-19 | 2908 | 1 | ACTTATACCACATGGTAACC |
| Ctrl-hg38-20 | 2909 | 1 | CTGCTATGGGGGGAGTTATT |
| Ctrl-hg38-21 | 2910 | 1 | AAGTCAACATGTCTAACTCA |
| Ctrl-hg38-22 | 2911 | 1 | CCTAGCTCACTTAAGTTTGC |
| Ctrl-hg38-23 | 2912 | 1 | GGGAGGTATTATTGGATTCT |
| Ctrl-hg38-24 | 2913 | 1 | TTTATCAATTTACTGAAGTA |
| Ctrl-hg38-25 | 2914 | 1 | CTTACCCTATAGGGGATATT |
| Ctrl-hg38-26 | 2915 | 1 | CATGAGCCCCAAGGGATCTT |
| Ctrl-hg38-27 | 2916 | 1 | AGGCCTGAGACTCACATTTC |
| Ctrl-hg38-28 | 2917 | 1 | TCAATCTCAGCCCAGGACCT |
| Ctrl-hg38-29 | 2918 | 1 | AGATACGTTTTAGACCTCAA |
| Ctrl-hg38-30 | 2919 | 1 | TAGAGCCTCAACCATGTTTT |
| Ctrl-hg38-31 | 2920 | 1 | CCAGGGGACCTGAACGCGTG |
| Ctrl-hg38-32 | 2921 | 1 | ACACAGAGACATCTCCTGTC |
| Ctrl-hg38-33 | 2922 | 1 | GGTAAGAATGAATAGTTCCC |
| Ctrl-hg38-34 | 2923 | 1 | TGTCCTCATTCCAATTCTTG |
| Ctrl-hg38-35 | 2924 | 1 | ATACGACTTAGCAGCCTTGT |
| Ctrl-hg38-36 | 2925 | 1 | AAGGCCAATGATTGAAGTCA |
| Ctrl-hg38-37 | 2926 | 1 | AGCACTTTAACTAGACAATA |
| Ctrl-hg38-38 | 2927 | 1 | AGCAACACCAGCATCATGGC |
| Ctrl-hg38-39 | 2928 | 1 | TAATTAAACACTTGCAACAT |
| Ctrl-hg38-40 | 2929 | 1 | GAAGCACACGTGGTGTATTT |
| Ctrl-hg38-41 | 2930 | 1 | GGAGCTTGAAGTTCTAAATG |
| Ctrl-hg38-42 | 2931 | 1 | AATCAGCATTAACAGAAAGG |
| Ctrl-hg38-43 | 2932 | 1 | CATGCTTAAGAGTTTCCTAT |
| Ctrl-hg38-44 | 2933 | 1 | ATCATACCCCATGAGACTTT |
| Ctrl-hg38-45 | 2934 | 1 | ATACTCACATCATGTTAAGA |
| Ctrl-hg38-46 | 2935 | 1 | CGCCCATGTTGGCCATAAAC |
| Ctrl-hg38-47 | 2936 | 1 | ATCAGTCTGTCTTGTAGGCA |
| Ctrl-hg38-48 | 2937 | 1 | TTGCTGGGCTGACCCAAGCT |
| Ctrl-hg38-49 | 2938 | 1 | GTTTAGGTAAAAATACCTTG |
| Ctrl-hg38-50 | 2939 | 1 | TTCTACCCCACCACATCCCA |
| Ctrl-hg38-51 | 2940 | 1 | TCGTGGAAACATACAAGTCT |
| Ctrl-hg38-52 | 2941 | 1 | TCATGGTCGGATGAGTTGGG |
| Ctrl-hg38-53 | 2942 | 1 | AAGCATTTGCATCCAGACAA |
| Ctrl-hg38-54 | 2943 | 1 | CCTGCTTCAGCCACTAAGCA |
| Ctrl-hg38-55 | 2944 | 1 | TGGTCTAGCGTGTCTCGCTC |
| Ctrl-hg38-56 | 2945 | 1 | CCAGCCAAACTACACCCCAG |
| Ctrl-hg38-57 | 2946 | 1 | CAACGACTGCATTAGGGCAA |
| Ctrl-hg38-58 | 2947 | 1 | TTCCCTGGGATAGCTGATAT |
| Ctrl-hg38-59 | 2948 | 1 | TGTTGTGTGCATACCCTAGT |
| Ctrl-hg38-60 | 2949 | 1 | GATGAATATGAATGTATGAC |
| Ctrl-hg38-61 | 2950 | 1 | TAAGTGCATTTCTATGTCCT |
| Ctrl-hg38-62 | 2951 | 1 | GATTATCTATCCTGGTTCCC |
| Ctrl-hg38-63 | 2952 | 1 | AATAAATAGCATGACTTATG |
| Ctrl-hg38-64 | 2953 | 1 | TTTGCAATCCCCGAGGTGAC |
| Ctrl-hg38-65 | 2954 | 1 | GCTGCCACAAAGGTTGTCAA |
| Ctrl-hg38-66 | 2955 | 1 | GCAATAATTAGGACCACCCA |
| Ctrl-hg38-67 | 2956 | 1 | AGATGACTGGAGTGCTACAA |
| Ctrl-hg38-68 | 2957 | 1 | CTCATTGACCCACATAAAAT |
| Ctrl-hg38-69 | 2958 | 1 | AACTCTTCTGTCGATGAGCA |
| Ctrl-hg38-70 | 2959 | 1 | GGGTAAACAGTCATGCTGCA |
| CTRL-non | 2960 | 1 | AAACTGTGCGACGGTAAGCG |
| CTRL-non | 2961 | 2 | AAAGATTCACCTCGCTACGG |
| CTRL-non | 2962 | 3 | AACATGTCATCGTTTACGCC |
| CTRL-non | 2963 | 4 | AACCGATTTCAATCGCGTGG |
| CTRL-non | 2964 | 5 | AACGAAAGCTCGTTAACTCG |
| CTRL-non | 2965 | 6 | AACGATGCGGGCGACGTGCT |
| CTRL-non | 2966 | 7 | AACTCCCCCGACTCCGTTCG |
| CTRL-non | 2967 | 8 | AAGCGATGGTCCGTATACTA |
| CTRL-non | 2968 | 9 | AATATTTGGCTCGGCTGCGC |
| CTRL-non | 2969 | 10 | AATCCGGAGTAATCCGACCC |
| CTRL-non | 2970 | 11 | AATCGACTCGAACTTCGTGT |
| CTRL-non | 2971 | 12 | ACACCATATCGGCGGGACGC |
| B2M | 2972 | 1 | GGCCGAGATGTCTCGCTCCG |
| B2M | 2973 | 1 | GGCCGAGATGTCTCGCTCCG |
| B2M | 2974 | 2 | GGCCACGGAGCGAGACATCT |
| B2M | 2975 | 2 | GGCCACGGAGCGAGACATCT |
| B2M | 2976 | 1 | GGCCGAGATGTCTCGCTCCG |
| B2M | 2977 | 1 | GGCCGAGATGTCTCGCTCCG |
| B2M | 2978 | 2 | GGCCACGGAGCGAGACATCT |
| B2M | 2979 | 2 | GGCCACGGAGCGAGACATCT |

TABLE 6D
Library of gene modulatory reagents.

| Target | SEQ | | |
|---|---|---|---|
| gene | ID NO | gRNA # | gRNA Seq |
| BIRC5 | 2980 | 1 | AGTTCTTGAATGTAGAGATG |
| BIRC5 | 2981 | 2 | GGGCAGTCTCACCCGCTCCG |
| BIRC5 | 2982 | 3 | TCTTGAATGTAGAGATGCGG |
| BIRC5 | 2983 | 4 | CAAGTCTGGCTCGTTCTCAG |
| BRAF | 2984 | 1 | GGGCCAGGCTCTGTTCAACG |
| BRAF | 2985 | 2 | ATACCCAATAGAGTCCGAGG |
| BRAF | 2986 | 3 | GCCCAACAAACAGAGGACAG |
| BRAF | 2987 | 4 | TCATAATTAACACACATCAG |
| CDK4 | 2988 | 1 | AAGGCCCGTGATCCCCACAG |
| CDK4 | 2989 | 2 | GTCTACATGCTCAAACACCA |
| CDK4 | 2990 | 3 | CCAGTGGCTGAAATTGGTGT |
| CDK4 | 2991 | 4 | AGCCACTGGCTCATATCGAG |
| CDK6 | 2992 | 1 | GCCCGCGACTTGAAGAACGG |
| CDK6 | 2993 | 2 | CCAGCAGTACGAATGCGTGG |
| CDK6 | 2994 | 3 | GACCTTCGAGCACCCCAACG |
| CDK6 | 2995 | 4 | AATGAAGAAAGTCCAGACCT |
| CYP11B1 | 2996 | 1 | CACTGTCCTGGGGACCCGGG |
| CYP11B1 | 2997 | 2 | AATGGGCCCTAGTTCCTGGA |
| CYP11B1 | 2998 | 3 | CAAAGGGCAGCACTGTCCTG |
| CYP11B1 | 2999 | 4 | CCCCACAGGTACGACTTGGG |
| CYP11B2 | 3000 | 1 | CATCGGGAGGAACCTCTGCA |
| CYP11B2 | 3001 | 2 | AAACGGCAGCACCGTCCTAG |
| CYP11B2 | 3002 | 3 | CCCCACAGGTACAACTTGGG |
| CYP11B2 | 3003 | 4 | CAACTTGGGAGGACCACGCA |
| EGFR | 3004 | 1 | GAGAACCTAGAAATCATACG |
| EGFR | 3005 | 2 | TGTCACCACATAATTACCTG |
| EGFR | 3006 | 3 | CCAGATGGATGTGAACCCCG |
| EGFR | 3007 | 4 | ATGGACTTCCAGAACCACCT |
| FLT3 | 3008 | 1 | AGATACATCCACTTCCACAG |
| FLT3 | 3009 | 2 | GAGACAGGAAATGTTCCCTG |
| FLT3 | 3010 | 3 | AGAACAATGATTCATCAGTG |
| FLT3 | 3011 | 4 | AAAGCTGTTCATGTGAACCA |
| GART | 3012 | 1 | TTATCCTGGAGACTACACCA |
| GART | 3013 | 2 | AGAATTGAGCAAGGGCAGTG |
| GART | 3014 | 3 | TATCCTGGAGACTACACCAA |
| GART | 3015 | 4 | GTCTTCGGGAAGTACCTGAG |
| JAK1 | 3016 | 1 | ACAAAGAGGAGAGATACCTG |
| JAK1 | 3017 | 2 | GAGGAGCTCCAAGAAGACTG |
| JAK1 | 3018 | 3 | CAAAGGACAAGGCCTCCTCG |
| JAK1 | 3019 | 4 | GAAGACTGAGGTGAACCTGG |
| JAK2 | 3020 | 1 | AGAGTTATAGATGGCCAGTG |
| JAK2 | 3021 | 2 | CTGCCACTGCAATACCAACG |
| JAK2 | 3022 | 3 | CAACCTCACCAACATTACAG |
| JAK2 | 3023 | 4 | AATGAAGAGTACAACCTCAG |
| KIF11 | 3024 | 1 | TCTTGTGTAGGAGTATACGG |
| KIF11 | 3025 | 2 | GAAGGGGAAGAACATCCAGG |
| KIF11 | 3026 | 3 | GCCCTCCAAGAGAATCCTGG |
| KIF11 | 3027 | 4 | TTCGTCTGCGAAGAAGAAAG |
| KIT | 3028 | 1 | CTGGGTCTGTGAGAGGACAG |
| KIT | 3029 | 2 | GCCTAATCTCGTCGCCCACG |
| KIT | 3030 | 3 | TCAACCATCTGTGAGTCCAG |
| KIT | 3031 | 4 | ACCACTAGCTTTCCAAACGG |
| MAP2K1 | 3032 | 1 | AAGCACAAGATCATGCACAG |
| MAP2K1 | 3033 | 2 | GCAGCAGCGAAAGCGCCTTG |
| MAP2K1 | 3034 | 3 | GAGTTGACTAGGATGTTGGA |
| MAP2K1 | 3035 | 4 | CTTACCCAGAAGCAGAAGGT |
| MAP2K2 | 3036 | 1 | AAGCACCAGATCATGCACCG |
| MAP2K2 | 3037 | 2 | CCTGGGGAAAGTCAGCATCG |
| MAP2K2 | 3038 | 3 | AGGTGCTGAAAGAGGCCAAG |
| MAP2K2 | 3039 | 4 | GGATTCCCGAGGAGATCCTG |
| MDM2 | 3040 | 1 | TTCCGAAGCTGGAATCTGTG |
| MDM2 | 3041 | 2 | CGAAGCTGGAATCTGTGAGG |
| MDM2 | 3042 | 3 | ACAGGTGTCACCTTGAAGGT |
| MDM2 | 3043 | 4 | GTGGTTACAGCACCATCAGT |
| MET | 3044 | 1 | TCAGCTTCCCAACTTCACCG |
| MET | 3045 | 2 | CTTGGTGCAGAGGAGCAATG |
| MET | 3046 | 3 | ACTCTGTTCGATATTCATCA |
| MET | 3047 | 4 | ATGTCAGCAGTATGATTGTG |
| MTOR | 3048 | 1 | GCTGATGCAAGTGAAGACTG |
| MTOR | 3049 | 2 | TCAGGAAATGATCCGCACAG |
| MTOR | 3050 | 3 | AATAGGGTGAATGATCCGGG |
| MTOR | 3051 | 4 | CGTGCTGGACATCATCCGAG |
| PIK3CA | 3052 | 1 | TTATTAATGTAGCCTCACGG |
| PIK3CA | 3053 | 2 | CCATCATCAGGTGAACTGTG |
| PIK3CA | 3054 | 3 | GTTTGACTGGTTCAGCAGTG |
| PIK3CA | 3055 | 4 | AGCAAATCTTCTAATCCATG |
| PSMB5 | 3056 | 1 | CTGCAACTATGACTCCATGG |
| PSMB5 | 3057 | 2 | CGTGTTGGAGAGACCGCTAC |
| PSMB5 | 3058 | 3 | CCGCTACCGGTGAACCAGCG |
| PSMB5 | 3059 | 4 | GAGATCAACCCATACCTGCT |
| RPL3 | 3060 | 1 | GGCTACGTGGAAACCCCTCG |
| RPL3 | 3061 | 2 | CATTGTAGAGACACCACCCA |
| RPL3 | 3062 | 3 | TGTAGAGACACCACCCATGG |
| RPL3 | 3063 | 4 | TGTGGGCATTGTGGGCTACG |
| TOP2A | 3064 | 1 | ATATAATGACTTCATCAACA |
| TOP2A | 3065 | 2 | TGTTGTGAAGAAGAAGAACA |
| TOP2A | 3066 | 3 | GTGTACGCTTATCCTGACTG |
| TOP2A | 3067 | 4 | AACCAATGTAGGTGTCTGGG |
| TUBG1 | 3068 | 1 | CCAGGACGAGATGAGCGATG |
| TUBG1 | 3069 | 2 | TGTGTCACTCCATTGCTGGG |
| TUBG1 | 3070 | 3 | TTTTGACATCATAGACCGGG |
| TUBG1 | 3071 | 4 | TGTAGGGTGATGATTTCCCT |

### EXAMPLES

### Example 1

### Genetic Pharmacopeia

[0285] A drug library comprising molecularly targeted oncology drugs of Table 2B was generated. The drug library is updated periodically to include additional targeted oncology drugs as they are identified. A genetic pharmacopeia was generated to represent the genetic targets of the drug library (Table 5B).

[0286] A library of gene modulatory reagents comprising guide RNA (gRNA) sequences associated with each gene target was designed. As shown in Table 6A, five potential gRNA sequences were designed for each oncology drug target to generate gRNA sequences having SEQ ID NOS: 1-1525. The library of gene modulatory reagents is constructed to comprise at least one gRNA sequence selected from SEQ ID NOS: 1-1525. The library is constructed in a format compatible with use in primary cancer cells using a viral delivery method (adenovirus for Cas nuclease delivery, lentivirus for gRNA delivery).

### Example 2

### Cancer Functional Susceptibility Profiling

[0287] A method is performed to determine the functional susceptibility of a patient's cancer cells to one or more perturbagens which model the action of the targeted oncology drugs identified in Example 1. The library comprising at least one gRNA sequence selected from SEQ ID NOS: 1-1525 and associated gene editing agent(s) (e.g., RNA-guided nuclease) are delivered to primary cancer cells derived from the patient in order to genetically modify the cancer cells. The Cas nuclease and gRNA are delivered by lentivirus. In this example, genetic modification occurs via gene editing using a CRISPR-based method. The modified cancer cells are propagated in vivo, however, the method may be employed in in vitro environments that mimic the in vivo context. The effect of each gene edit is evaluated by screening the modified cancer cells in a pooled or array format. Next-generation sequencing is performed to determine the effect of the individual perturbations on the viability of the patient's cancer cells. Oncology drug(s) associated with the perturbagens that reduce viability of the cancer cells are selected as a putative therapeutic for the patient.

### Example 3

### CRISPR-Based Method for Personalized Functional Genomics

[0288] Methods for the identification of patient-specific tumor therapeutic vulnerabilities were performed utilizing function genomics as outlined in FIG. 2. Patient-derived samples, obtained directly from the patient or after passage in mice (PDX), were dissociated and infected with a gRNA library corresponding to the desired therapeutic drug collection. Cells were viably maintained in vitro, using 3D and/or organoid approaches, allowing gRNA which target essential tumor regulators to be gradually depleted from the population (“drop-out). This approach leveraged the insight that the effect of each clinically used targeted oncology drug can be modeled by CRISPR-mediated mutation of the corresponding gene encoding the drug target (FIG. 3).

[0289] Guide-RNA Library Cloning

[0290] A library of guide RNAs (gRNA) with 1685 elements having 1585 gRNAs directed against drug target genes and 100 control gRNAs was designed (FIG. 4). The library comprises the target gRNAs of Table 6B and control gRNAs having SEQ ID NOS: 2790-2959 of Table 6C. Guide RNAs targeting the ubiquitously expressed but not essential cell surface molecule beta-2 microglobulin (B2M) were also included. The 20 nt gRNA sequence was flanked on either side by a sequence containing a recognition site for the Type-IIS restriction enzyme Bbs-I, and outside of the Bbs-I elements flanked by primer binding sites that could be used for PCR amplification of the library. The upstream and downstream Bbs-I elements were designed such that Bbs-I digestion of the PCR product releases the 20 bp gRNA encoding sequence flanked with 4 bp overhangs compatible with the corresponding overhangs in the destination vector for gRNA expression. Using primers complementary to the primer binding sites in the library oligonucleotide pool, the library was amplified by PCR for 10 cycles using Q5 DNA polymerase. PCR products were purified using Zymo Clean&Concentrate kit and then included in a GoldenGate cloning reaction using 20 cycles of 37° C. digestion with Bbs-I followed by 16° C. ligation with T4-DNA ligase to introduce the library into the destination vector for gRNA expression. The GoldenGate cloning reaction was further cleaned using Zymo Clean&Concentrate kit and then used in multiple reactions for electroporation into electrocompetent Stbl-4 bacteria. The entire transformation reaction from 3-5 electroporations was inoculated into 600 ml of LB with appropriate antibiotic selection and grown for 18 hours at 30° C. to avoid recombination. Bacterial cells were harvested and DNA isolated using Zymo Maxiprep kit. Barcode readcount distribution was measured by next generation sequencing of the pooled plasmid DNA or transduced cells (FIG. 5), demonstrating near-complete barcode representation and broadly equal readcount distribution.

[0291] Another library of gRNAs directed against drug target genes was prepared comprising the gRNAs of Table 6D. The library also includes gRNAs having SEQ ID NOS: 2972-2979 directed to B2M, and control gRNAs having SEQ ID NOS: 2890-2905 and 2960-2971.

[0292] Virus Production

[0293] Lentiviral particles containing viral genome encoding expression units for the gRNA library and Cas9 were generated by transfecting 293FT cells with transfer vector and 2^{nd} generation lentiviral packaging plasmids (DR8.9 and pCMV-VSVG) in a ratio of 4:3:1 using Lipofectamine-3000 (Thermo) according to the manufacturer's instructions. Six hours after transfection, medium was changed to DMEM harvest medium containing 10% FCS. Virus containing supernatant was harvested at 30 and 54 hours after transfection, centrifuged for 5 minutes at 2500 rpm to remove debris and filtered through a 45 μm filter before pooling. Virus was precipitated from culture supernatants by incubation with PEG-8000 at 10% final concentration for >4 hours. PEG-precipitate was centrifuged for 1 hour at 4000 rpm and the pellet resuspended in ˜1/100 the original volume. Aliquots were stored at −80° C. until use.

[0294] Tumor Processing

[0295] Tumor pieces were finely chopped using sterile razor blades in 0.5 ml digestion mix (DMEM/F12 with 1 mg/ml collagenase IV, 10 uM Y27632 and 20 ug/ml DNase). These were digested for 30 min at 37C, triturated with a 10 ml pipette, then digested for an additional 15 min at 37 C. The mixture was strained through a 100 uM strainer. Cells were washed once with FACS buffer (PBS with 0.% BSA, 1 mM EDTA) and resuspended in organoid medium (Advanced DMEM/F12 with 10 uM SB202190, 1× HEPES, 1.25 mM N-acetylcysteine, 10 mM nicotinamide, 1X Glutamax, 1X Primocin, 5% Knockout Serum Replacement, 1× B27 supplement, 0.1 nM cholera toxin, 0.5 uM A83-01, 10 uM Y27632, 1 uM PGE2, 10 nM [Leu15]-Gastrin I, 10 ng/ml rhFGF10, 10 ng/ml rhFGF2, 50 ng/ml EGF, 0.3 ug/ml hydrocortisone). For FACS analysis, 10 ul of cell sample was diluted with 190u1 FACS buffer containing 5 nM ToPro-3.

[0296] Tumor Cell Infection and Culture

[0297] Cells were mixed in organoid medium with lentivirus at a target MOI of <1 in the presence 4 ug/ml polybrene, and incubated for 1 hour at room temperature. The suspension was then spun, the pellet resuspended in a minimal volume of organoid medium, and then plated onto collagen sponges (Ethicon) for 3D culture (FIG. 6A). Cells were grown at 37C with 5% CO2. Medium was changed every 2 days.

[0298] Sponge Harvest

[0299] Sponges were digested for 15 min at 37C with lmg/ml Collagenase IV in DMEM-F12. Analysis of the re-isolated cells demonstrated the outgrowth of the small tumor-derived tumoroids/organoids (FIG. 6B). A small sample was retained for FACS (as described above), and the remainder was spun at 1200 rpm for 5 min. The supernatant was discarded and the pellet frozen at −80 C for DNA isolation. Expression of beta-2 microglobulin protein was analyzed using directly conjugated anti-B2M antibodies (FIG. 7), demonstrating loss of B2M protein expression at the precise frequency expected based on the relative abundance of B2M-targeting gRNAs in the gRNA library.

[0300] Cancer Cell Line Culture

[0301] A549 lung carcinoma cells (American Type Culture Collection) were grown in Dulbecco's Modified Eagle Medium (Gibco) supplemented with 10% (v/v) fetal bovine serum, 1× Glutamax, and 1× antibiotic/antimycotic.

[0302] DNA Preparation, PCR, and Next-Generation Sequencing (NGS)

[0303] Genomic DNA was isolated using the Zymo Quick-DNA Miniprep Plus kit. 5 ug of purified genomic DNA was used as input for first round PCR amplification using the Q5 2X Master Mix and primers specific to the lentiviral vector. 10% of the resulting first round reaction products was then used as input for the second round of PCR amplification, utilizing barcoding primers to allow multiplex NGS readout. Samples were analyzed on the Illumina MiSeq using standard Illumina sequencing primers (Admera).

[0304] Sequence Analysis

[0305] Read1 sequences corresponding to the PCR barcodes were used for de-multiplexing, generating single-sample FASTA files containing gRNA readcounts. Sequencing data was analyzed using the CRISPRCloud2 platform, generating both CPM-normalized readcounts as well as statistical analysis of gRNA abundance based beta-binomial modeling. Data were visualized as ‘volcano’ plots (DataGraph), describing the relationship between statistical significance and fold-change in gRNA abundance. Typically, comparison was made between gRNA abundance immediately following lentiviral transduction and at the end of the in vitro culture period.

[0306] Analysis of dropout frequency using library screening in the A549 lung cancer cell line demonstrated clear loss of gRNAs corresponding to known essential genes (e.g. TOP2A, TUBG1 and others), while non-targeting control gRNAs demonstrated no corresponding decrease in abundance (FIG. 8). The library utilized in this experiment comprised the gRNAs of Tables 6B-6C (SEQ ID NOS: 1526-2959) as described above.

[0307] Analysis of dropout frequency using library screening in primary human melanoma tumor sample demonstrated clear loss of gRNAs corresponding to a known melanoma therapeutic vulnerability (e.g. BRAF), while non-targeting control gRNAs demonstrated no corresponding decrease in abundance (FIG. 9). Additional hits corresponding to presumptive cancer therapeutic vulnerabilities were also identified. The library utilized in this experiment comprised the gRNAs of Table 6D (SEQ ID NOS: 2980-3071) and SEQ ID NOS: 2890-2905 and 2960-2979 of Table 6C, as described above.

### Example 4

### In Vivo Validation of Personalized Genomic Profiling

[0308] Oncology drugs targeting presumptive cancer therapeutic vulnerabilities identified in Example 3, are tested in an in vivo animal model of the patient's cancer. Drugs that show efficacy for treating the cancer in the animal model are selected for treating the patient's cancer.

[0309] While preferred embodiments have been shown and described herein, it will be obvious to those skilled in the art that such embodiments are provided by way of example only. Numerous variations, changes, and substitutions will occur to those skilled in the art without departing from the scope of this application. Various alternatives to the embodiments described herein may be employed in practicing the scope of this application.

What is claimed is:

1. A method of treating cancer in a subject in need thereof, the method comprising administering to the subject a therapeutic molecule selected from a library of therapeutic molecules; wherein the therapeutic molecule has been selected by a method comprising: modifying cancer cells from the subject to knock down or knock out the function of a plurality of genes, each gene in the plurality of genes encoding for a protein target of a therapeutic molecule in the library of therapeutic molecules, whereby the therapeutic molecule has been selected if knocking down or knocking out the function of the gene that encodes for the protein target of the selected therapeutic molecule impairs cancer cell viability.

2. The method of claim 1, wherein the library of therapeutic molecules comprises at least 1, at least 2, at least 3, at least 4, at least 5, at least 10, or at least 20 therapeutic agents of Tables 2-3.

3. The method of claim 1 or claim 2, wherein one or more of the plurality of genes encode for a protein of Tables 3-5D.

4. A method of treating cancer in a subject in need thereof, the method comprising administering to the subject a therapeutic molecule selected from a library of therapeutic molecules; wherein the cancer of the subject has been determined to be susceptible to the selected therapeutic molecule by a method comprising:
(a) contacting a sample of cancer cells from the subject with a library of gene modulatory reagents to generate a plurality of modified cancer cells, wherein each modified cancer cell harbors one or more of the gene modulatory reagents, and each gene modulatory reagent is capable of knocking down or knocking out the function of a gene that encodes a protein target of a therapeutic molecule in the library of therapeutic molecules, and
(b) sequencing the plurality of modified cancer cells, wherein a gene modulatory reagent that impairs cell viability will have fewer sequence reads than a gene modulatory reagent that does not impair cell viability, and the gene that is knocked down or knocked out by the gene modulatory reagent that impairs cell viability encodes for the protein targeted by the selected therapeutic molecule.

5. The method of claim 4, wherein prior to sequencing, one or more of the plurality of modified cancer cells have been propagated.

6. The method of claim 4 or claim 5, wherein the cancer cells are primary cancer cells.

7. The method of any one of claims 4-6, wherein contacting comprises introducing the one or more gene modulatory reagents into each cancer cell by a viral or non-viral delivery method.

8. The method of claim 7, wherein one or more of the gene modulatory reagents in the library are encoded on a viral vector.

9. The method of any one of claims 4-8, wherein the library comprises from about 10 to about 2,000, from about 10 to about 500, from about 10 to about 200, from about 10 to about 150, from about 50 to about 500, from about 50 to about 200, from about 50 to about 2,000, from about 100 to about 2,000, or from about 500 to about 2,000 different gene modulatory reagents.

10. The method of any one of claims 4-9, wherein one or more gene modulatory reagents from the library of gene modulatory reagents comprises a nucleic acid sequence homologous to at least about 15 contiguous nucleotides of a gene encoding a protein of Tables 3-5D.

11. The method of any one of claims 4-10, wherein the library of therapeutic molecules comprises at least 1, at least 2, at least 3, at least 4, at least 5, at least 10, or at least 20 therapeutic agents of Tables 2-3.

12. The method of any one of claims 4-11, wherein one or more of the gene modulatory reagents each comprise a guide RNA (gRNA) sequence comprising at least about 90% homology to a sequence selected from SEQ ID NOS: 1-2789, 2980-3071.

13. The method of any one of claims 4-12, wherein one or more of the gene modulatory reagents comprise a guide RNA (gRNA) sequence comprising homology to at least a portion of the gene that encodes a protein target of a therapeutic molecule in the library of therapeutic molecules.

14. The method of any one of claims 4-13, wherein the sample of cancer cells is contacted with an endonuclease.

15. The method of claim 14, wherein the endonuclease comprises a Cas9 or Cas12a endonuclease.

16. The method of any one of claims 13-15, wherein the gRNA is positioned within a viral vector.

17. A method of generating a plurality of modified cancer cells from a subject having cancer, the method comprising delivering a library of gene modulatory reagents to a sample of cancer cells from the subject to generate the plurality of modified cancer cells; wherein each modified cancer cell harbors one or more of the gene modulatory reagents, and each gene modulatory reagent is capable of knocking down or knocking out the function of a gene that encodes a protein target from a library of protein targets.

18. The method of claim 17, wherein one or more of the gene modulatory reagents comprises a guide RNA (gRNA) sequence comprising homology to at least a portion of the gene whose function is knocked down or knocked out in the modified cancer cell.

19. The method of claim 17, wherein one or more of the gene modulatory reagents each comprise a guide RNA (gRNA) sequence comprising at least about 90% homology to a sequence selected from SEQ ID NOS: 1-2789, 2980-3071.

20. The method of any one of claims 17-19, wherein the sample of cancer cells is contacted with an endonuclease.

21. The method of claim 20, wherein the endonuclease comprises a Cas9 or Cas12a endonuclease.

22. The method of any one of claims 18-21, wherein the gRNA is positioned within a viral vector.

23. The method of any one of claims 17-22, wherein the sample of cancer cells comprises primary cancer cells.

24. The method of any one of claims 17-23, wherein the library comprises from about 10 to about 2,000, from about 10 to about 500, from about 10 to about 200, from about 10 to about 150, from about 50 to about 500, from about 50 to about 200, from about 50 to about 2,000, from about 100 to about 2,000, or from about 500 to about 2,000 different gene modulatory reagents.

25. The method of any one of claims 17-24, wherein the library of protein targets comprises at least 1, at least 2, at least 3, at least 4, at least 5, at least 10, or at least 20 protein targets of Tables 3-5D.

26. The method of any one of claims 17-25, further comprising propagating the modified cancer cells.

27. A compilation comprising a plurality of modified cancer cells, wherein each modified cancer cell harbors one or more gene modulatory reagents, and each gene modulatory reagent is capable of knocking down or knocking out the function of a gene that encodes a protein target from a library of protein targets.

28. The compilation of claim 27, wherein at least one of the one or more of gene modulatory reagents comprises a sequence at least about 90% homologous to a sequence selected from SEQ ID NOS: 1-2789, 2980-3071.

29. The compilation of claim 27 or claim 28, wherein the library of protein targets comprises at least 1, at least 2, at least 3, at least 4, at least 5, at least 10, or at least 20 protein targets of Tables 3-5D.

30. The compilation of any of claims 27-29, wherein one of more of the gene modulatory reagents comprise a guide RNA (gRNA) sequence comprising homology to at least a portion of the gene whose function is knocked down or knocked out in the modified cancer cell.

31. The compilation of claim 30, wherein the gRNA comprises homology to about 10 to about 50 contiguous nucleotides of the gene.

32. The compilation of claim 30 or claim 31, further comprising an endonuclease.

33. The compilation of claim 32, wherein the endonuclease comprises a Cas9 or Cas12a endonuclease.

34. The compilation of any one of claims 30-33, wherein the gRNA is positioned within a viral vector.

35. The compilation of any one of claims 27-34, wherein the modified cancer cells are modified primary cancer cells.

36. The compilation of any one of claims 27-35, comprising from about 10 to about 2,000, from about 10 to about 500, from about 10 to about 200, from about 10 to about 150, from about 50 to about 500, from about 50 to about 200, from about 50 to about 2,000, from about 100 to about 2,000, or from about 500 to about 2,000 different gene modulatory reagents.

37. The compilation of any one of claims 27-36, comprising from about 10 to about 2,000, from about 10 to about 500, from about 10 to about 200, from about 10 to about 150, from about 50 to about 500, from about 50 to about 200, from about 50 to about 2,000, from about 100 to about 2,000, or from about 500 to about 2,000 different populations of modified cancer cells.

38. A method of evaluating the functional effect of genetically modifying cancer cells from a subject, the method comprising: sequencing a plurality of modified cancer cells, wherein each modified cancer cell harbors one or more gene modulatory reagents, each gene modulatory reagent capable of knocking down or knocking out the function of a gene that encodes a protein target in a library of protein targets; and wherein a gene modulatory reagent that impairs cell viability will have fewer sequence reads than a gene modulatory reagent that does not impair cell viability.

39. The method of claim 38, further comprising determining which gene modulatory regents have fewer than a threshold number of sequence reads.

40. The method of claim 39, wherein the threshold number of sequence reads is an expected number of sequence reads if the gene modulatory reagent did not impair cell viability.

41. The method of claim 39, wherein the threshold number of sequence reads is an average number of sequence reads for each gene modulatory reagent in the plurality of modified cancer cells.

42. The method of any one of claims 38-41, further comprising correlating each gene modulatory reagent that has fewer than the threshold number of sequence reads to its corresponding protein target in the library of protein targets.

43. The method of claim 42, further comprising correlating the corresponding protein target to a therapeutic molecule.

44. The method of any one of claims 38-43, wherein the library of protein targets comprises at least 1, at least 2, at least 3, at least 4, at least 5, at least 10, or at least 20 protein targets of Tables 3-5D.

45. The method of any one of claims 38-44, wherein one or more of the gene modulatory reagents each comprise a guide RNA (gRNA) sequence comprising at least about 90% homology to a sequence selected from SEQ ID NOS: 1-2789, 2980-3071.

46. A library comprising a plurality of gene modulatory reagents, each gene modulatory reagent capable of knocking down or knocking out the function of a gene that encodes a protein target from a library of protein targets.

47. The library of claim 46, wherein the plurality of gene modulatory reagents is capable of knocking down or knocking out the function of at least about 50% of the genes that encode for the protein targets in the library.

48. The library of claim 46 or claim 47, wherein the library of protein targets comprises at least 1, at least 2, at least 3, at least 4, at least 5, at least 10, or at least 20 protein targets of Tables 3-5D.

49. The library of any one of claims 46-48, wherein one or more of the plurality of gene modulatory reagents each comprise a guide RNA (gRNA) sequence comprising at least about 90% homology to a sequence selected from SEQ ID NOS: 1-2789, 2980-3071.

50. The library of any one of claims 46-49, wherein the plurality of gene modulatory reagents is capable of knocking down or knocking out the function of about 10 to about 2,000, from about 10 to about 500, from about 10 to about 200, from about 10 to about 150, from about 50 to about 500, from about 50 to about 200, about 50 to about 2,000, or about 100 to about 2,000 genes.

51. The library of any one of claims 46-50, wherein the library comprises about 10 to about 2,000, from about 10 to about 500, from about 10 to about 200, from about 10 to about 150, from about 50 to about 500, from about 50 to about 200, about 50 to about 2,000, or about 100 to about 2,000 gene modulatory reagents.

52. The library of any one of claims 46-51, wherein at least one of the gene modulatory reagents is capable of knocking out the function of a gene.

53. The library of claim 52, wherein at least one of the gene modulatory reagents comprise a gRNA sequence having homology to at least a portion of the gene whose function is knocked out by the gene modulatory reagent.

54. The library of any one of claims 46-53, wherein at least one of the gene modulatory reagents is positioned within a viral vector.

The application's sequence listing, which the Patent Office published only in electronic form, follows.

SEQUENCE LISTING (3071 sequences)

SEQ ID NO: 1 - DNA, 20 bp, Artificial Sequence
  Description of Artificial Sequence: Synthetic oligonucleotide
ggacacaggcccatggtacc

SEQ ID NO: 2 - DNA, 20 bp, Artificial Sequence
  Description of Artificial Sequence: Synthetic oligonucleotide
atcattcaacggtggccgac

SEQ ID NO: 3 - DNA, 20 bp, Artificial Sequence
  Description of Artificial Sequence: Synthetic oligonucleotide
catcacgccagtcaacagtc

SEQ ID NO: 4 - DNA, 20 bp, Artificial Sequence
  Description of Artificial Sequence: Synthetic oligonucleotide
atctcagcgagatggacctc

SEQ ID NO: 5 - DNA, 20 bp, Artificial Sequence
  Description of Artificial Sequence: Synthetic oligonucleotide
aagaaggaatcatcgaggca

SEQ ID NO: 6 - DNA, 20 bp, Artificial Sequence
  Description of Artificial Sequence: Synthetic oligonucleotide
cctcagccccgcgggatccg

SEQ ID NO: 7 - DNA, 20 bp, Artificial Sequence
  Description of Artificial Sequence: Synthetic oligonucleotide
ttaccatgaagcacaaactt

SEQ ID NO: 8 - DNA, 20 bp, Artificial Sequence
  Description of Artificial Sequence: Synthetic oligonucleotide
ggtgaaaagctacgagtcct

SEQ ID NO: 9 - DNA, 20 bp, Artificial Sequence
  Description of Artificial Sequence: Synthetic oligonucleotide
ggagtacgcgagagcaggga

SEQ ID NO: 10 - DNA, 20 bp, Artificial Sequence
  Description of Artificial Sequence: Synthetic oligonucleotide
gagtacgcgagagcagggat

SEQ ID NO: 11 - DNA, 20 bp, Artificial Sequence
  Description of Artificial Sequence: Synthetic oligonucleotide
gcagccctgtttcccccaga

SEQ ID NO: 12 - DNA, 20 bp, Artificial Sequence
  Description of Artificial Sequence: Synthetic oligonucleotide
cctactctggcagcccatcc

SEQ ID NO: 13 - DNA, 20 bp, Artificial Sequence
  Description of Artificial Sequence: Synthetic oligonucleotide
gaaagaggaactgtgtgcac

SEQ ID NO: 14 - DNA, 20 bp, Artificial Sequence
  Description of Artificial Sequence: Synthetic oligonucleotide
agtcacaaacttcaactcct

SEQ ID NO: 15 - DNA, 20 bp, Artificial Sequence
  Description of Artificial Sequence: Synthetic oligonucleotide
ccagatgctgacaccttctg

SEQ ID NO: 16 - DNA, 20 bp, Artificial Sequence
  Description of Artificial Sequence: Synthetic oligonucleotide
gagacttcggggtcaaggcc

SEQ ID NO: 17 - DNA, 20 bp, Artificial Sequence
  Description of Artificial Sequence: Synthetic oligonucleotide
caggcttgatggatccgtct

SEQ ID NO: 18 - DNA, 20 bp, Artificial Sequence
  Description of Artificial Sequence: Synthetic oligonucleotide
aaaccatcttatactatggc

SEQ ID NO: 19 - DNA, 20 bp, Artificial Sequence
  Description of Artificial Sequence: Synthetic oligonucleotide
ccaaagtggagccaatcccc

SEQ ID NO: 20 - DNA, 20 bp, Artificial Sequence
  Description of Artificial Sequence: Synthetic oligonucleotide
ctcccagctaacacagcaga

SEQ ID NO: 21 - DNA, 20 bp, Artificial Sequence
  Description of Artificial Sequence: Synthetic oligonucleotide
gaacgtcaccaactactttg

SEQ ID NO: 22 - DNA, 20 bp, Artificial Sequence
  Description of Artificial Sequence: Synthetic oligonucleotide
ttgccatccgcatcccgctc

SEQ ID NO: 23 - DNA, 20 bp, Artificial Sequence
  Description of Artificial Sequence: Synthetic oligonucleotide
catggccacagacgacaggc

SEQ ID NO: 24 - DNA, 20 bp, Artificial Sequence
  Description of Artificial Sequence: Synthetic oligonucleotide
tgggcatggccacagacgac

SEQ ID NO: 25 - DNA, 20 bp, Artificial Sequence
  Description of Artificial Sequence: Synthetic oligonucleotide
agcacaccagcacattgccc

SEQ ID NO: 26 - DNA, 20 bp, Artificial Sequence
  Description of Artificial Sequence: Synthetic oligonucleotide
tgggcatcttgccttcccag

SEQ ID NO: 27 - DNA, 20 bp, Artificial Sequence
  Description of Artificial Sequence: Synthetic oligonucleotide
gacagagcagtgctgttgtt

SEQ ID NO: 28 - DNA, 20 bp, Artificial Sequence
  Description of Artificial Sequence: Synthetic oligonucleotide
aatagaaggtggtggtctgc

SEQ ID NO: 29 - DNA, 20 bp, Artificial Sequence
  Description of Artificial Sequence: Synthetic oligonucleotide
caaggacatgatggaggcgt

SEQ ID NO: 30 - DNA, 20 bp, Artificial Sequence
  Description of Artificial Sequence: Synthetic oligonucleotide
gtccttgctggccatcgctg

SEQ ID NO: 31 - DNA, 20 bp, Artificial Sequence
  Description of Artificial Sequence: Synthetic oligonucleotide
ggacccccctttacatggac

SEQ ID NO: 32 - DNA, 20 bp, Artificial Sequence
  Description of Artificial Sequence: Synthetic oligonucleotide
caacctgcctcctcgcatca

SEQ ID NO: 33 - DNA, 20 bp, Artificial Sequence
  Description of Artificial Sequence: Synthetic oligonucleotide
cccccggctgccatgatgcg

SEQ ID NO: 34 - DNA, 20 bp, Artificial Sequence
  Description of Artificial Sequence: Synthetic oligonucleotide
tccagtacgtgttccagacc

SEQ ID NO: 35 - DNA, 20 bp, Artificial Sequence
  Description of Artificial Sequence: Synthetic oligonucleotide
catttgggggcagcgagccg

SEQ ID NO: 36 - DNA, 20 bp, Artificial Sequence
  Description of Artificial Sequence: Synthetic oligonucleotide
tggcaccttcattggctaca

SEQ ID NO: 37 - DNA, 20 bp, Artificial Sequence
  Description of Artificial Sequence: Synthetic oligonucleotide
ggctcacccagtgacaactc

SEQ ID NO: 38 - DNA, 20 bp, Artificial Sequence
  Description of Artificial Sequence: Synthetic oligonucleotide
gccgtcagccacagtctgga

SEQ ID NO: 39 - DNA, 20 bp, Artificial Sequence
  Description of Artificial Sequence: Synthetic oligonucleotide
cgacgtggctattgtgaagg

SEQ ID NO: 40 - DNA, 20 bp, Artificial Sequence
  Description of Artificial Sequence: Synthetic oligonucleotide
ggaggagatggacttccggt

SEQ ID NO: 41 - DNA, 20 bp, Artificial Sequence
  Description of Artificial Sequence: Synthetic oligonucleotide
atgacaaaggtgttgggtcg

SEQ ID NO: 42 - DNA, 20 bp, Artificial Sequence
  Description of Artificial Sequence: Synthetic oligonucleotide
ctggtgcgggagaaggccac

SEQ ID NO: 43 - DNA, 20 bp, Artificial Sequence
  Description of Artificial Sequence: Synthetic oligonucleotide
caggaagtaccgtggcctcc

SEQ ID NO: 44 - DNA, 20 bp, Artificial Sequence
  Description of Artificial Sequence: Synthetic oligonucleotide
gtccatggggtcctcgcctg

SEQ ID NO: 45 - DNA, 20 bp, Artificial Sequence
  Description of Artificial Sequence: Synthetic oligonucleotide
tgtctgtcatcaaagaaggc

SEQ ID NO: 46 - DNA, 20 bp, Artificial Sequence
  Description of Artificial Sequence: Synthetic oligonucleotide
tttgactatttgaaactact

SEQ ID NO: 47 - DNA, 20 bp, Artificial Sequence
  Description of Artificial Sequence: Synthetic oligonucleotide
ttaccattgtgaaagaaggt

SEQ ID NO: 48 - DNA, 20 bp, Artificial Sequence
  Description of Artificial Sequence: Synthetic oligonucleotide
gatgttaccattgtgaaaga

SEQ ID NO: 49 - DNA, 20 bp, Artificial Sequence
  Description of Artificial Sequence: Synthetic oligonucleotide
tctctataacagtagtccac

SEQ ID NO: 50 - DNA, 20 bp, Artificial Sequence
  Description of Artificial Sequence: Synthetic oligonucleotide
tcccctcaacaacttttcag

SEQ ID NO: 51 - DNA, 20 bp, Artificial Sequence
  Description of Artificial Sequence: Synthetic oligonucleotide
gacctgccattgaggagtgt

SEQ ID NO: 52 - DNA, 20 bp, Artificial Sequence
  Description of Artificial Sequence: Synthetic oligonucleotide
cccctccactgcatgacctc

SEQ ID NO: 53 - DNA, 20 bp, Artificial Sequence
  Description of Artificial Sequence: Synthetic oligonucleotide
gtccagagctagcgagccgc

SEQ ID NO: 54 - DNA, 20 bp, Artificial Sequence
  Description of Artificial Sequence: Synthetic oligonucleotide
tcagcgagctgttcagttgg

SEQ ID NO: 55 - DNA, 20 bp, Artificial Sequence
  Description of Artificial Sequence: Synthetic oligonucleotide
attccagggccactcgaaat

SEQ ID NO: 56 - DNA, 20 bp, Artificial Sequence
  Description of Artificial Sequence: Synthetic oligonucleotide
ctgccattctgactcacata

SEQ ID NO: 57 - DNA, 20 bp, Artificial Sequence
  Description of Artificial Sequence: Synthetic oligonucleotide
acagtgggagaagatataac

SEQ ID NO: 58 - DNA, 20 bp, Artificial Sequence
  Description of Artificial Sequence: Synthetic oligonucleotide
tcgtcaaacatatataatcc

SEQ ID NO: 59 - DNA, 20 bp, Artificial Sequence
  Description of Artificial Sequence: Synthetic oligonucleotide
gagaaatccggttccacgtg

SEQ ID NO: 60 - DNA, 20 bp, Artificial Sequence
  Description of Artificial Sequence: Synthetic oligonucleotide
gcaccctatgtgagtcagaa

SEQ ID NO: 61 - DNA, 20 bp, Artificial Sequence
  Description of Artificial Sequence: Synthetic oligonucleotide
ggcagttgtccatctctggc

SEQ ID NO: 62 - DNA, 20 bp, Artificial Sequence
  Description of Artificial Sequence: Synthetic oligonucleotide
cggaagagcatggacagcat

SEQ ID NO: 63 - DNA, 20 bp, Artificial Sequence
  Description of Artificial Sequence: Synthetic oligonucleotide
agcaatatcaggtccagcat

SEQ ID NO: 64 - DNA, 20 bp, Artificial Sequence
  Description of Artificial Sequence: Synthetic oligonucleotide
aagcaatatcaggtccagca

SEQ ID NO: 65 - DNA, 20 bp, Artificial Sequence
  Description of Artificial Sequence: Synthetic oligonucleotide
caggaggaaagtgtagctgc

SEQ ID NO: 66 - DNA, 20 bp, Artificial Sequence
  Description of Artificial Sequence: Synthetic oligonucleotide
ccacgctttactttggtcca

SEQ ID NO: 67 - DNA, 20 bp, Artificial Sequence
  Description of Artificial Sequence: Synthetic oligonucleotide
cccgctgtccacacccgcct

SEQ ID NO: 68 - DNA, 20 bp, Artificial Sequence
  Description of Artificial Sequence: Synthetic oligonucleotide
cgccggcgttgaagtctggc

SEQ ID NO: 69 - DNA, 20 bp, Artificial Sequence
  Description of Artificial Sequence: Synthetic oligonucleotide
ttgaactcggccttcatggc

SEQ ID NO: 70 - DNA, 20 bp, Artificial Sequence
  Description of Artificial Sequence: Synthetic oligonucleotide
ctcagtcttgtcaatgtcgg

SEQ ID NO: 71 - DNA, 20 bp, Artificial Sequence
  Description of Artificial Sequence: Synthetic oligonucleotide
gccatctggcggatggagat

SEQ ID NO: 72 - DNA, 20 bp, Artificial Sequence
  Description of Artificial Sequence: Synthetic oligonucleotide
tgaccgaccggtcagatgcc

SEQ ID NO: 73 - DNA, 20 bp, Artificial Sequence
  Description of Artificial Sequence: Synthetic oligonucleotide
tcttggtccatgtgaccgac

SEQ ID NO: 74 - DNA, 20 bp, Artificial Sequence
  Description of Artificial Sequence: Synthetic oligonucleotide
acccatctccatccgccaga

SEQ ID NO: 75 - DNA, 20 bp, Artificial Sequence
  Description of Artificial Sequence: Synthetic oligonucleotide
ttagcatcgctgagtgagga

SEQ ID NO: 76 - DNA, 20 bp, Artificial Sequence
  Description of Artificial Sequence: Synthetic oligonucleotide
atcagcagatatttctgtgt

SEQ ID NO: 77 - DNA, 20 bp, Artificial Sequence
  Description of Artificial Sequence: Synthetic oligonucleotide
ctcttgccatgaaccaaaca

SEQ ID NO: 78 - DNA, 20 bp, Artificial Sequence
  Description of Artificial Sequence: Synthetic oligonucleotide
tcttgccatgaaccaaacaa

SEQ ID NO: 79 - DNA, 20 bp, Artificial Sequence
  Description of Artificial Sequence: Synthetic oligonucleotide
taggccagcagtcgcataga

SEQ ID NO: 80 - DNA, 20 bp, Artificial Sequence
  Description of Artificial Sequence: Synthetic oligonucleotide
ataggccagcagtcgcatag

SEQ ID NO: 81 - DNA, 20 bp, Artificial Sequence
  Description of Artificial Sequence: Synthetic oligonucleotide
tagaggccccacaggctacc

SEQ ID NO: 82 - DNA, 20 bp, Artificial Sequence
  Description of Artificial Sequence: Synthetic oligonucleotide
gcagctgagtcatcctcgtc

SEQ ID NO: 83 - DNA, 20 bp, Artificial Sequence
  Description of Artificial Sequence: Synthetic oligonucleotide
gcccatcgtagaggccccac

SEQ ID NO: 84 - DNA, 20 bp, Artificial Sequence
  Description of Artificial Sequence: Synthetic oligonucleotide
cagcagggacaacgtggatg

SEQ ID NO: 85 - DNA, 20 bp, Artificial Sequence
  Description of Artificial Sequence: Synthetic oligonucleotide
tccaggaccaggtagcctgt

SEQ ID NO: 86 - DNA, 20 bp, Artificial Sequence
  Description of Artificial Sequence: Synthetic oligonucleotide
tggagcggatgcgctgtagg

SEQ ID NO: 87 - DNA, 20 bp, Artificial Sequence
  Description of Artificial Sequence: Synthetic oligonucleotide
acaaaattgtgcatggtcag

SEQ ID NO: 88 - DNA, 20 bp, Artificial Sequence
  Description of Artificial Sequence: Synthetic oligonucleotide
acagactgtggggaccttgg

SEQ ID NO: 89 - DNA, 20 bp, Artificial Sequence
  Description of Artificial Sequence: Synthetic oligonucleotide
gtggagcggatgcgctgtag

SEQ ID NO: 90 - DNA, 20 bp, Artificial Sequence
  Description of Artificial Sequence: Synthetic oligonucleotide
gtggtctaccgactcatcaa

SEQ ID NO: 91 - DNA, 20 bp, Artificial Sequence
  Description of Artificial Sequence: Synthetic oligonucleotide
caagaagaatattccttgag

SEQ ID NO: 92 - DNA, 20 bp, Artificial Sequence
  Description of Artificial Sequence: Synthetic oligonucleotide
cgcacgtcagcattctggca

SEQ ID NO: 93 - DNA, 20 bp, Artificial Sequence
  Description of Artificial Sequence: Synthetic oligonucleotide
caacttgtctgtactcttca

SEQ ID NO: 94 - DNA, 20 bp, Artificial Sequence
  Description of Artificial Sequence: Synthetic oligonucleotide
tccagagacagatgctgact

SEQ ID NO: 95 - DNA, 20 bp, Artificial Sequence
  Description of Artificial Sequence: Synthetic oligonucleotide
acatgtccgtgttcagagaa

SEQ ID NO: 96 - DNA, 20 bp, Artificial Sequence
  Description of Artificial Sequence: Synthetic oligonucleotide
gtgcttgcaaaggaatgcgc

SEQ ID NO: 97 - DNA, 20 bp, Artificial Sequence
  Description of Artificial Sequence: Synthetic oligonucleotide
attacctgtaaatagtggcc

SEQ ID NO: 98 - DNA, 20 bp, Artificial Sequence
  Description of Artificial Sequence: Synthetic oligonucleotide
atgcgctgggaagaatttga

SEQ ID NO: 99 - DNA, 20 bp, Artificial Sequence
  Description of Artificial Sequence: Synthetic oligonucleotide
tgcttgcaaaggaatgcgct

SEQ ID NO: 100 - DNA, 20 bp, Artificial Sequence
  Description of Artificial Sequence: Synthetic oligonucleotide
tgagtcacgagaacacgttt

SEQ ID NO: 101 - DNA, 20 bp, Artificial Sequence
  Description of Artificial Sequence: Synthetic oligonucleotide
tccccctttctctctaagga

SEQ ID NO: 102 - DNA, 20 bp, Artificial Sequence
  Description of Artificial Sequence: Synthetic oligonucleotide
aactcctacccctggcccta

SEQ ID NO: 103 - DNA, 20 bp, Artificial Sequence
  Description of Artificial Sequence: Synthetic oligonucleotide
gggccatccttagagagaaa

SEQ ID NO: 104 - DNA, 20 bp, Artificial Sequence
  Description of Artificial Sequence: Synthetic oligonucleotide
ctccatcaccttctggccag

SEQ ID NO: 105 - DNA, 20 bp, Artificial Sequence
  Description of Artificial Sequence: Synthetic oligonucleotide
ggacattggagcggctcatg

SEQ ID NO: 106 - DNA, 20 bp, Artificial Sequence
  Description of Artificial Sequence: Synthetic oligonucleotide
aatcgggcgtcccctgggca

SEQ ID NO: 107 - DNA, 20 bp, Artificial Sequence
  Description of Artificial Sequence: Synthetic oligonucleotide
atcgggcgtcccctgggcaa

SEQ ID NO: 108 - DNA, 20 bp, Artificial Sequence
  Description of Artificial Sequence: Synthetic oligonucleotide
tttgaaatcgggcgtcccct

SEQ ID NO: 109 - DNA, 20 bp, Artificial Sequence
  Description of Artificial Sequence: Synthetic oligonucleotide
cagtcgatgactttgaaatc

SEQ ID NO: 110 - DNA, 20 bp, Artificial Sequence
  Description of Artificial Sequence: Synthetic oligonucleotide
ccaaatttccccttgcccag

SEQ ID NO: 111 - DNA, 20 bp, Artificial Sequence
  Description of Artificial Sequence: Synthetic oligonucleotide
gagtaggtccacgggctctg

SEQ ID NO: 112 - DNA, 20 bp, Artificial Sequence
  Description of Artificial Sequence: Synthetic oligonucleotide
tgccacacacactgtcagat

SEQ ID NO: 113 - DNA, 20 bp, Artificial Sequence
  Description of Artificial Sequence: Synthetic oligonucleotide
gcctagccgaagctgatggg

SEQ ID NO: 114 - DNA, 20 bp, Artificial Sequence
  Description of Artificial Sequence: Synthetic oligonucleotide
ccacctccagctccgtgggt

SEQ ID NO: 115 - DNA, 20 bp, Artificial Sequence
  Description of Artificial Sequence: Synthetic oligonucleotide
agtaggtccacgggctctgg

SEQ ID NO: 116 - DNA, 20 bp, Artificial Sequence
  Description of Artificial Sequence: Synthetic oligonucleotide
ccagtaccccctacagggtg

SEQ ID NO: 117 - DNA, 20 bp, Artificial Sequence
  Description of Artificial Sequence: Synthetic oligonucleotide
cccacggcgcaagaggtagc

SEQ ID NO: 118 - DNA, 20 bp, Artificial Sequence
  Description of Artificial Sequence: Synthetic oligonucleotide
gcagttgtgagtccagtggg

SEQ ID NO: 119 - DNA, 20 bp, Artificial Sequence
  Description of Artificial Sequence: Synthetic oligonucleotide
tggcaggggctatgagcagc

SEQ ID NO: 120 - DNA, 20 bp, Artificial Sequence
  Description of Artificial Sequence: Synthetic oligonucleotide
gggggcgcccacggcgcaag

SEQ ID NO: 121 - DNA, 20 bp, Artificial Sequence
  Description of Artificial Sequence: Synthetic oligonucleotide
atgatctgctcagagctggt

SEQ ID NO: 122 - DNA, 20 bp, Artificial Sequence
  Description of Artificial Sequence: Synthetic oligonucleotide
gcagctgacatgttttctga

SEQ ID NO: 123 - DNA, 20 bp, Artificial Sequence
  Description of Artificial Sequence: Synthetic oligonucleotide
gtttcatccaggatcgagca

SEQ ID NO: 124 - DNA, 20 bp, Artificial Sequence
  Description of Artificial Sequence: Synthetic oligonucleotide
tctgacggcaacttcaactg

SEQ ID NO: 125 - DNA, 20 bp, Artificial Sequence
  Description of Artificial Sequence: Synthetic oligonucleotide
ggcggtgatggacgggtccg

SEQ ID NO: 126 - DNA, 20 bp, Artificial Sequence
  Description of Artificial Sequence: Synthetic oligonucleotide
ccattataagctgtcgcaga

SEQ ID NO: 127 - DNA, 20 bp, Artificial Sequence
  Description of Artificial Sequence: Synthetic oligonucleotide
tccagccgcatcccgggacc

SEQ ID NO: 128 - DNA, 20 bp, Artificial Sequence
  Description of Artificial Sequence: Synthetic oligonucleotide
cgcgcggggacgctttgcca

SEQ ID NO: 129 - DNA, 20 bp, Artificial Sequence
  Description of Artificial Sequence: Synthetic oligonucleotide
gcggcgaggtcctggcgacc

SEQ ID NO: 130 - DNA, 20 bp, Artificial Sequence
  Description of Artificial Sequence: Synthetic oligonucleotide
cacacctggatccaggataa

SEQ ID NO: 131 - DNA, 20 bp, Artificial Sequence
  Description of Artificial Sequence: Synthetic oligonucleotide
tcccagctccacatcacccc

SEQ ID NO: 132 - DNA, 20 bp, Artificial Sequence
  Description of Artificial Sequence: Synthetic oligonucleotide
agcagtaaagcaagcgctga

SEQ ID NO: 133 - DNA, 20 bp, Artificial Sequence
  Description of Artificial Sequence: Synthetic oligonucleotide
tggcaacccatcctggcacc

SEQ ID NO: 134 - DNA, 20 bp, Artificial Sequence
  Description of Artificial Sequence: Synthetic oligonucleotide
tcctacaagctttcccagaa

SEQ ID NO: 135 - DNA, 20 bp, Artificial Sequence
  Description of Artificial Sequence: Synthetic oligonucleotide
cagcagcagtttggatgccc

SEQ ID NO: 136 - DNA, 20 bp, Artificial Sequence
  Description of Artificial Sequence: Synthetic oligonucleotide
ctgagccgccagatcagaga

SEQ ID NO: 137 - DNA, 20 bp, Artificial Sequence
  Description of Artificial Sequence: Synthetic oligonucleotide
gacctgggtgaagcgttgtt

SEQ ID NO: 138 - DNA, 20 bp, Artificial Sequence
  Description of Artificial Sequence: Synthetic oligonucleotide
aggcagaagggttatgtctg

SEQ ID NO: 139 - DNA, 20 bp, Artificial Sequence
  Description of Artificial Sequence: Synthetic oligonucleotide
ggttataagctgaggcagaa

SEQ ID NO: 140 - DNA, 20 bp, Artificial Sequence
  Description of Artificial Sequence: Synthetic oligonucleotide
gcgttgttgggctgagcctg

SEQ ID NO: 141 - DNA, 20 bp, Artificial Sequence
  Description of Artificial Sequence: Synthetic oligonucleotide
ccaggcagggggcaacgtcg

SEQ ID NO: 142 - DNA, 20 bp, Artificial Sequence
  Description of Artificial Sequence: Synthetic oligonucleotide
atgcggtggtccttgagaaa

SEQ ID NO: 143 - DNA, 20 bp, Artificial Sequence
  Description of Artificial Sequence: Synthetic oligonucleotide
gctgcgcctgcaccccggag

SEQ ID NO: 144 - DNA, 20 bp, Artificial Sequence
  Description of Artificial Sequence: Synthetic oligonucleotide
gaacataaaaagcattcgtc

SEQ ID NO: 145 - DNA, 20 bp, Artificial Sequence
  Description of Artificial Sequence: Synthetic oligonucleotide
caggcgcagccctccaagaa

SEQ ID NO: 146 - DNA, 20 bp, Artificial Sequence
  Description of Artificial Sequence: Synthetic oligonucleotide
ctggccaggtcactcgtcac

SEQ ID NO: 147 - DNA, 20 bp, Artificial Sequence
  Description of Artificial Sequence: Synthetic oligonucleotide
gagaagctacaggtcctgaa

SEQ ID NO: 148 - DNA, 20 bp, Artificial Sequence
  Description of Artificial Sequence: Synthetic oligonucleotide
ctttagatcacagggtcgga

SEQ ID NO: 149 - DNA, 20 bp, Artificial Sequence
  Description of Artificial Sequence: Synthetic oligonucleotide
aggtggttctttagatcaca

SEQ ID NO: 150 - DNA, 20 bp, Artificial Sequence
  Description of Artificial Sequence: Synthetic oligonucleotide
gaaggtcagcgcccaagaca

SEQ ID NO: 151 - DNA, 20 bp, Artificial Sequence
  Description of Artificial Sequence: Synthetic oligonucleotide
tgtcatattcatagtaggaa

SEQ ID NO: 152 - DNA, 20 bp, Artificial Sequence
  Description of Artificial Sequence: Synthetic oligonucleotide
actgcatgttgaagtttggc

SEQ ID NO: 153 - DNA, 20 bp, Artificial Sequence
  Description of Artificial Sequence: Synthetic oligonucleotide
tggtacttgaagatggtggc

SEQ ID NO: 154 - DNA, 20 bp, Artificial Sequence
  Description of Artificial Sequence: Synthetic oligonucleotide
ggtacttgaagatggtggct

SEQ ID NO: 155 - DNA, 20 bp, Artificial Sequence
  Description of Artificial Sequence: Synthetic oligonucleotide
tggtacttgaccagcaggtg

SEQ ID NO: 156 - DNA, 20 bp, Artificial Sequence
  Description of Artificial Sequence: Synthetic oligonucleotide
agagaagaaaccaattggtt

SEQ ID NO: 157 - DNA, 20 bp, Artificial Sequence
  Description of Artificial Sequence: Synthetic oligonucleotide
gagagaagaaaccaattggt

SEQ ID NO: 158 - DNA, 20 bp, Artificial Sequence
  Description of Artificial Sequence: Synthetic oligonucleotide
caacagttattggaatctct

SEQ ID NO: 159 - DNA, 20 bp, Artificial Sequence
  Description of Artificial Sequence: Synthetic oligonucleotide
gtgctttctttagactgtct

SEQ ID NO: 160 - DNA, 20 bp, Artificial Sequence
  Description of Artificial Sequence: Synthetic oligonucleotide
tgggtggtgttcaaagaact

SEQ ID NO: 161 - DNA, 20 bp, Artificial Sequence
  Description of Artificial Sequence: Synthetic oligonucleotide
gcaggcaccgaagccattgt

SEQ ID NO: 162 - DNA, 20 bp, Artificial Sequence
  Description of Artificial Sequence: Synthetic oligonucleotide
tggacatgggtactattaag

SEQ ID NO: 163 - DNA, 20 bp, Artificial Sequence
  Description of Artificial Sequence: Synthetic oligonucleotide
aagagacggcaggcacctga

SEQ ID NO: 164 - DNA, 20 bp, Artificial Sequence
  Description of Artificial Sequence: Synthetic oligonucleotide
gggcactggtaacactgccc

SEQ ID NO: 165 - DNA, 20 bp, Artificial Sequence
  Description of Artificial Sequence: Synthetic oligonucleotide
gtgtccaatcccaaaaagcc

SEQ ID NO: 166 - DNA, 20 bp, Artificial Sequence
  Description of Artificial Sequence: Synthetic oligonucleotide
tcgtggcggtggacatcctc

SEQ ID NO: 167 - DNA, 20 bp, Artificial Sequence
  Description of Artificial Sequence: Synthetic oligonucleotide
atttgattgcgtccacgggc

SEQ ID NO: 168 - DNA, 20 bp, Artificial Sequence
  Description of Artificial Sequence: Synthetic oligonucleotide
acctttgccctttggagcag

SEQ ID NO: 169 - DNA, 20 bp, Artificial Sequence
  Description of Artificial Sequence: Synthetic oligonucleotide
gagtgcaagcgaatgtatgc

SEQ ID NO: 170 - DNA, 20 bp, Artificial Sequence
  Description of Artificial Sequence: Synthetic oligonucleotide
cgccacgacagtcgcccccg

SEQ ID NO: 171 - DNA, 20 bp, Artificial Sequence
  Description of Artificial Sequence: Synthetic oligonucleotide
gggtggccgcgatgatgggt

SEQ ID NO: 172 - DNA, 20 bp, Artificial Sequence
  Description of Artificial Sequence: Synthetic oligonucleotide
tctttggaggtttcacaggc

SEQ ID NO: 173 - DNA, 20 bp, Artificial Sequence
  Description of Artificial Sequence: Synthetic oligonucleotide
gagcaggtattgcagttggt

SEQ ID NO: 174 - DNA, 20 bp, Artificial Sequence
  Description of Artificial Sequence: Synthetic oligonucleotide
ttcagcttgacggcatccac

SEQ ID NO: 175 - DNA, 20 bp, Artificial Sequence
  Description of Artificial Sequence: Synthetic oligonucleotide
tggctcgtgaatggggtcaa

SEQ ID NO: 176 - DNA, 20 bp, Artificial Sequence
  Description of Artificial Sequence: Synthetic oligonucleotide
cttccttagttcttcagttg

SEQ ID NO: 177 - DNA, 20 bp, Artificial Sequence
  Description of Artificial Sequence: Synthetic oligonucleotide
tctccccaactgaagaacta

SEQ ID NO: 178 - DNA, 20 bp, Artificial Sequence
  Description of Artificial Sequence: Synthetic oligonucleotide
gaaccagatcactgttgtac

SEQ ID NO: 179 - DNA, 20 bp, Artificial Sequence
  Description of Artificial Sequence: Synthetic oligonucleotide
gcccttcatcatatacaacc

SEQ ID NO: 180 - DNA, 20 bp, Artificial Sequence
  Description of Artificial Sequence: Synthetic oligonucleotide
aatccggtacaacagtgatc

SEQ ID NO: 181 - DNA, 20 bp, Artificial Sequence
  Description of Artificial Sequence: Synthetic oligonucleotide
tggtttccacttcgcagcac

SEQ ID NO: 182 - DNA, 20 bp, Artificial Sequence
  Description of Artificial Sequence: Synthetic oligonucleotide
atgccaacctcctcaacgac

SEQ ID NO: 183 - DNA, 20 bp, Artificial Sequence
  Description of Artificial Sequence: Synthetic oligonucleotide
gcacaggagctggtgttcca

SEQ ID NO: 184 - DNA, 20 bp, Artificial Sequence
  Description of Artificial Sequence: Synthetic oligonucleotide
gcgacgatcttccgcatgga

SEQ ID NO: 185 - DNA, 20 bp, Artificial Sequence
  Description of Artificial Sequence: Synthetic oligonucleotide
ggttggcatcggggtacgcg

SEQ ID NO: 186 - DNA, 20 bp, Artificial Sequence
  Description of Artificial Sequence: Synthetic oligonucleotide
tgcagatgggacttcggagt

SEQ ID NO: 187 - DNA, 20 bp, Artificial Sequence
  Description of Artificial Sequence: Synthetic oligonucleotide
ctcgtggcacagcagctcca

SEQ ID NO: 188 - DNA, 20 bp, Artificial Sequence
  Description of Artificial Sequence: Synthetic oligonucleotide
ccaggtaattcatggccaga

SEQ ID NO: 189 - DNA, 20 bp, Artificial Sequence
  Description of Artificial Sequence: Synthetic oligonucleotide
cagctccatggccagcccgg

SEQ ID NO: 190 - DNA, 20 bp, Artificial Sequence
  Description of Artificial Sequence: Synthetic oligonucleotide
gcagaacctgctcaccatcg

SEQ ID NO: 191 - DNA, 20 bp, Artificial Sequence
  Description of Artificial Sequence: Synthetic oligonucleotide
tactcgggcagcgaacaggc

SEQ ID NO: 192 - DNA, 20 bp, Artificial Sequence
  Description of Artificial Sequence: Synthetic oligonucleotide
ggggtacgtagcgctcctcc

SEQ ID NO: 193 - DNA, 20 bp, Artificial Sequence
  Description of Artificial Sequence: Synthetic oligonucleotide
aacacagcagctccatactc

SEQ ID NO: 194 - DNA, 20 bp, Artificial Sequence
  Description of Artificial Sequence: Synthetic oligonucleotide
gtcttgcgtccccacccgaa

SEQ ID NO: 195 - DNA, 20 bp, Artificial Sequence
  Description of Artificial Sequence: Synthetic oligonucleotide
atggagctgctgtgttgcga

SEQ ID NO: 196 - DNA, 20 bp, Artificial Sequence
  Description of Artificial Sequence: Synthetic oligonucleotide
attacccacatatctctggc

SEQ ID NO: 197 - DNA, 20 bp, Artificial Sequence
  Description of Artificial Sequence: Synthetic oligonucleotide
ctggacccatgtgcacccca

SEQ ID NO: 198 - DNA, 20 bp, Artificial Sequence
  Description of Artificial Sequence: Synthetic oligonucleotide
gtgacgcctcccccaggaag

SEQ ID NO: 199 - DNA, 20 bp, Artificial Sequence
  Description of Artificial Sequence: Synthetic oligonucleotide
agagctgaaggacgatcgcc

SEQ ID NO: 200 - DNA, 20 bp, Artificial Sequence
  Description of Artificial Sequence: Synthetic oligonucleotide
cgggccacagctcaagacgc

SEQ ID NO: 201 - DNA, 20 bp, Artificial Sequence
  Description of Artificial Sequence: Synthetic oligonucleotide
tctgaagtgcagcatttccc

SEQ ID NO: 202 - DNA, 20 bp, Artificial Sequence
  Description of Artificial Sequence: Synthetic oligonucleotide
ttgaaggaccagctctccct

SEQ ID NO: 203 - DNA, 20 bp, Artificial Sequence
  Description of Artificial Sequence: Synthetic oligonucleotide
taccgctgcatgatcagcta

SEQ ID NO: 204 - DNA, 20 bp, Artificial Sequence
  Description of Artificial Sequence: Synthetic oligonucleotide
tgaacatgaactgacatgtc

SEQ ID NO: 205 - DNA, 20 bp, Artificial Sequence
  Description of Artificial Sequence: Synthetic oligonucleotide
tgaactgacatgtcaggctg

SEQ ID NO: 206 - DNA, 20 bp, Artificial Sequence
  Description of Artificial Sequence: Synthetic oligonucleotide
tatcagccactaatgaagtt

SEQ ID NO: 207 - DNA, 20 bp, Artificial Sequence
  Description of Artificial Sequence: Synthetic oligonucleotide
tgaaagcatcccatacactt

SEQ ID NO: 208 - DNA, 20 bp, Artificial Sequence
  Description of Artificial Sequence: Synthetic oligonucleotide
ccggggacaaaccctgctgc

SEQ ID NO: 209 - DNA, 20 bp, Artificial Sequence
  Description of Artificial Sequence: Synthetic oligonucleotide
ctcctagagagccggcagca

SEQ ID NO: 210 - DNA, 20 bp, Artificial Sequence
  Description of Artificial Sequence: Synthetic oligonucleotide
ctggacctgtgtgaactgat

SEQ ID NO: 211 - DNA, 20 bp, Artificial Sequence
  Description of Artificial Sequence: Synthetic oligonucleotide
ccatagttagtcaatgggta

SEQ ID NO: 212 - DNA, 20 bp, Artificial Sequence
  Description of Artificial Sequence: Synthetic oligonucleotide
aagggtagacacaaaactac

SEQ ID NO: 213 - DNA, 20 bp, Artificial Sequence
  Description of Artificial Sequence: Synthetic oligonucleotide
acacaaaactacaggtcaag

SEQ ID NO: 214 - DNA, 20 bp, Artificial Sequence
  Description of Artificial Sequence: Synthetic oligonucleotide
tatccctcctggtcagtaca

SEQ ID NO: 215 - DNA, 20 bp, Artificial Sequence
  Description of Artificial Sequence: Synthetic oligonucleotide
agatctccagaagtattgct

SEQ ID NO: 216 - DNA, 20 bp, Artificial Sequence
  Description of Artificial Sequence: Synthetic oligonucleotide
ccttaagcagagagatctct

SEQ ID NO: 217 - DNA, 20 bp, Artificial Sequence
  Description of Artificial Sequence: Synthetic oligonucleotide
aagcagagagatctctcgga

SEQ ID NO: 218 - DNA, 20 bp, Artificial Sequence
  Description of Artificial Sequence: Synthetic oligonucleotide
tggaataatatttgcagccc

SEQ ID NO: 219 - DNA, 20 bp, Artificial Sequence
  Description of Artificial Sequence: Synthetic oligonucleotide
cgagctcctgaaatcctcct

SEQ ID NO: 220 - DNA, 20 bp, Artificial Sequence
  Description of Artificial Sequence: Synthetic oligonucleotide
aataatatttgcagcccagg

SEQ ID NO: 221 - DNA, 20 bp, Artificial Sequence
  Description of Artificial Sequence: Synthetic oligonucleotide
cttgccagccgaaacgatca

SEQ ID NO: 222 - DNA, 20 bp, Artificial Sequence
  Description of Artificial Sequence: Synthetic oligonucleotide
acctcacgaactgtgctgat

SEQ ID NO: 223 - DNA, 20 bp, Artificial Sequence
  Description of Artificial Sequence: Synthetic oligonucleotide
tgcctatgggacagtgtaca

SEQ ID NO: 224 - DNA, 20 bp, Artificial Sequence
  Description of Artificial Sequence: Synthetic oligonucleotide
cacgaactgtgctgatggga

SEQ ID NO: 225 - DNA, 20 bp, Artificial Sequence
  Description of Artificial Sequence: Synthetic oligonucleotide
agcatgtagaccaggaccta

SEQ ID NO: 226 - DNA, 20 bp, Artificial Sequence
  Description of Artificial Sequence: Synthetic oligonucleotide
atctcccggagggcggaact

SEQ ID NO: 227 - DNA, 20 bp, Artificial Sequence
  Description of Artificial Sequence: Synthetic oligonucleotide
tctgcatcgcggcggccgcg

SEQ ID NO: 228 - DNA, 20 bp, Artificial Sequence
  Description of Artificial Sequence: Synthetic oligonucleotide
gaggctggatgacgatgatg

SEQ ID NO: 229 - DNA, 20 bp, Artificial Sequence
  Description of Artificial Sequence: Synthetic oligonucleotide
tttctcgtatttctgcatcg

SEQ ID NO: 230 - DNA, 20 bp, Artificial Sequence
  Description of Artificial Sequence: Synthetic oligonucleotide
tccatcgacatgtggtcagc

SEQ ID NO: 231 - DNA, 20 bp, Artificial Sequence
  Description of Artificial Sequence: Synthetic oligonucleotide
gaagaacggaggccgtttcg

SEQ ID NO: 232 - DNA, 20 bp, Artificial Sequence
  Description of Artificial Sequence: Synthetic oligonucleotide
ccactgaggttagagccatc

SEQ ID NO: 233 - DNA, 20 bp, Artificial Sequence
  Description of Artificial Sequence: Synthetic oligonucleotide
agttcagatgttgatcaact

SEQ ID NO: 234 - DNA, 20 bp, Artificial Sequence
  Description of Artificial Sequence: Synthetic oligonucleotide
aacattctggtgaccagcag

SEQ ID NO: 235 - DNA, 20 bp, Artificial Sequence
  Description of Artificial Sequence: Synthetic oligonucleotide
ccgcatctatagtttccaga

SEQ ID NO: 236 - DNA, 20 bp, Artificial Sequence
  Description of Artificial Sequence: Synthetic oligonucleotide
tcgggctttacggcgccgga

SEQ ID NO: 237 - DNA, 20 bp, Artificial Sequence
  Description of Artificial Sequence: Synthetic oligonucleotide
atttatgtccaaaagcatca

SEQ ID NO: 238 - DNA, 20 bp, Artificial Sequence
  Description of Artificial Sequence: Synthetic oligonucleotide
acttcacgtccagagccatc

SEQ ID NO: 239 - DNA, 20 bp, Artificial Sequence
  Description of Artificial Sequence: Synthetic oligonucleotide
caatagagcttatacacatc

SEQ ID NO: 240 - DNA, 20 bp, Artificial Sequence
  Description of Artificial Sequence: Synthetic oligonucleotide
aactttgggcacaccaactg

SEQ ID NO: 241 - DNA, 20 bp, Artificial Sequence
  Description of Artificial Sequence: Synthetic oligonucleotide
gcttctaaaacacgagaatg

SEQ ID NO: 242 - DNA, 20 bp, Artificial Sequence
  Description of Artificial Sequence: Synthetic oligonucleotide
cgagcaacagctccgggggc

SEQ ID NO: 243 - DNA, 20 bp, Artificial Sequence
  Description of Artificial Sequence: Synthetic oligonucleotide
tctgcgagcatgaccttgct

SEQ ID NO: 244 - DNA, 20 bp, Artificial Sequence
  Description of Artificial Sequence: Synthetic oligonucleotide
cggcccccggagctgttgct

SEQ ID NO: 245 - DNA, 20 bp, Artificial Sequence
  Description of Artificial Sequence: Synthetic oligonucleotide
tacccttgcagcggttatag

SEQ ID NO: 246 - DNA, 20 bp, Artificial Sequence
  Description of Artificial Sequence: Synthetic oligonucleotide
ataggatggctgcttcttca

SEQ ID NO: 247 - DNA, 20 bp, Artificial Sequence
  Description of Artificial Sequence: Synthetic oligonucleotide
attccttggaggtctaaatt

SEQ ID NO: 248 - DNA, 20 bp, Artificial Sequence
  Description of Artificial Sequence: Synthetic oligonucleotide
ggcttctcaaatgaatgctg

SEQ ID NO: 249 - DNA, 20 bp, Artificial Sequence
  Description of Artificial Sequence: Synthetic oligonucleotide
tattatctggtggtttaatg

SEQ ID NO: 250 - DNA, 20 bp, Artificial Sequence
  Description of Artificial Sequence: Synthetic oligonucleotide
gcattgatgagtattttagc

SEQ ID NO: 251 - DNA, 20 bp, Artificial Sequence
  Description of Artificial Sequence: Synthetic oligonucleotide
ccagttgatgtttggtcctg

SEQ ID NO: 252 - DNA, 20 bp, Artificial Sequence
  Description of Artificial Sequence: Synthetic oligonucleotide
caaaatctcagactttggct

SEQ ID NO: 253 - DNA, 20 bp, Artificial Sequence
  Description of Artificial Sequence: Synthetic oligonucleotide
ttatttctggagtactgtag

SEQ ID NO: 254 - DNA, 20 bp, Artificial Sequence
  Description of Artificial Sequence: Synthetic oligonucleotide
gagattcttccatcaactca

SEQ ID NO: 255 - DNA, 20 bp, Artificial Sequence
  Description of Artificial Sequence: Synthetic oligonucleotide
atggtattggaataactcac

SEQ ID NO: 256 - DNA, 20 bp, Artificial Sequence
  Description of Artificial Sequence: Synthetic oligonucleotide
gttgaggctcagcagtctca

SEQ ID NO: 257 - DNA, 20 bp, Artificial Sequence
  Description of Artificial Sequence: Synthetic oligonucleotide
cgattatgggcccttcagga

SEQ ID NO: 258 - DNA, 20 bp, Artificial Sequence
  Description of Artificial Sequence: Synthetic oligonucleotide
tgcctgtggagaggtaaagc

SEQ ID NO: 259 - DNA, 20 bp, Artificial Sequence
  Description of Artificial Sequence: Synthetic oligonucleotide
tgatcagtcagtttatccta

SEQ ID NO: 260 - DNA, 20 bp, Artificial Sequence
  Description of Artificial Sequence: Synthetic oligonucleotide
aatacagagcttgtagggaa

SEQ ID NO: 261 - DNA, 20 bp, Artificial Sequence
  Description of Artificial Sequence: Synthetic oligonucleotide
tgcaaaaatcaatcggactc

SEQ ID NO: 262 - DNA, 20 bp, Artificial Sequence
  Description of Artificial Sequence: Synthetic oligonucleotide
catcatcactggcgtgtacc

SEQ ID NO: 263 - DNA, 20 bp, Artificial Sequence
  Description of Artificial Sequence: Synthetic oligonucleotide
gtgtctttgacagccgggac

SEQ ID NO: 264 - DNA, 20 bp, Artificial Sequence
  Description of Artificial Sequence: Synthetic oligonucleotide
gtcggtgaggcctcttatga

SEQ ID NO: 265 - DNA, 20 bp, Artificial Sequence
  Description of Artificial Sequence: Synthetic oligonucleotide
tttaatacttcccggatccc

SEQ ID NO: 266 - DNA, 20 bp, Artificial Sequence
  Description of Artificial Sequence: Synthetic oligonucleotide
gcacgatgacgacagctgtc

SEQ ID NO: 267 - DNA, 20 bp, Artificial Sequence
  Description of Artificial Sequence: Synthetic oligonucleotide
gccaccatttatatgaacat

SEQ ID NO: 268 - DNA, 20 bp, Artificial Sequence
  Description of Artificial Sequence: Synthetic oligonucleotide
tgtatgtgatgtcggcagac

SEQ ID NO: 269 - DNA, 20 bp, Artificial Sequence
  Description of Artificial Sequence: Synthetic oligonucleotide
ccatgtctgtttacccgcaa

SEQ ID NO: 270 - DNA, 20 bp, Artificial Sequence
  Description of Artificial Sequence: Synthetic oligonucleotide
cgcaccatactgacttcttg

SEQ ID NO: 271 - DNA, 20 bp, Artificial Sequence
  Description of Artificial Sequence: Synthetic oligonucleotide
tggtgtccaggcccgaggat

SEQ ID NO: 272 - DNA, 20 bp, Artificial Sequence
  Description of Artificial Sequence: Synthetic oligonucleotide
cgtcattgtgctctggtgca

SEQ ID NO: 273 - DNA, 20 bp, Artificial Sequence
  Description of Artificial Sequence: Synthetic oligonucleotide
tggtgtccgcgggtggtgag

SEQ ID NO: 274 - DNA, 20 bp, Artificial Sequence
  Description of Artificial Sequence: Synthetic oligonucleotide
cgcgggtggtgagaggtaca

SEQ ID NO: 275 - DNA, 20 bp, Artificial Sequence
  Description of Artificial Sequence: Synthetic oligonucleotide
cctcgggcctggacaccagc

SEQ ID NO: 276 - DNA, 20 bp, Artificial Sequence
  Description of Artificial Sequence: Synthetic oligonucleotide
taaccagattggctctggcc

SEQ ID NO: 277 - DNA, 20 bp, Artificial Sequence
  Description of Artificial Sequence: Synthetic oligonucleotide
gagccaatctggttaacatt

SEQ ID NO: 278 - DNA, 20 bp, Artificial Sequence
  Description of Artificial Sequence: Synthetic oligonucleotide
catcctgcccagccgacgtg

SEQ ID NO: 279 - DNA, 20 bp, Artificial Sequence
  Description of Artificial Sequence: Synthetic oligonucleotide
agagccaatctggttaacat

SEQ ID NO: 280 - DNA, 20 bp, Artificial Sequence
  Description of Artificial Sequence: Synthetic oligonucleotide
agtccccaggatacctaccc

SEQ ID NO: 281 - DNA, 20 bp, Artificial Sequence
  Description of Artificial Sequence: Synthetic oligonucleotide
ggccacgcaggagtagttgc

SEQ ID NO: 282 - DNA, 20 bp, Artificial Sequence
  Description of Artificial Sequence: Synthetic oligonucleotide
tccttcctggccagaaaccc

SEQ ID NO: 283 - DNA, 20 bp, Artificial Sequence
  Description of Artificial Sequence: Synthetic oligonucleotide
tcctgtgctagcacgttcca

SEQ ID NO: 284 - DNA, 20 bp, Artificial Sequence
  Description of Artificial Sequence: Synthetic oligonucleotide
atcccagacctgcagcactt

SEQ ID NO: 285 - DNA, 20 bp, Artificial Sequence
  Description of Artificial Sequence: Synthetic oligonucleotide
aacggtgaccttgcgatgtg

SEQ ID NO: 286 - DNA, 20 bp, Artificial Sequence
  Description of Artificial Sequence: Synthetic oligonucleotide
gatcataattgtcatgtcca

SEQ ID NO: 287 - DNA, 20 bp, Artificial Sequence
  Description of Artificial Sequence: Synthetic oligonucleotide
catcatattggcgctgctga

SEQ ID NO: 288 - DNA, 20 bp, Artificial Sequence
  Description of Artificial Sequence: Synthetic oligonucleotide
agcagcgccaatatgatgtc

SEQ ID NO: 289 - DNA, 20 bp, Artificial Sequence
  Description of Artificial Sequence: Synthetic oligonucleotide
gcttactgcaagagaggcaa

SEQ ID NO: 290 - DNA, 20 bp, Artificial Sequence
  Description of Artificial Sequence: Synthetic oligonucleotide
tgaggatagccaaggttctg

SEQ ID NO: 291 - DNA, 20 bp, Artificial Sequence
  Description of Artificial Sequence: Synthetic oligonucleotide
taatcaagatgattaccaac

SEQ ID NO: 292 - DNA, 20 bp, Artificial Sequence
  Description of Artificial Sequence: Synthetic oligonucleotide
gaccaagttttcgaaccagt

SEQ ID NO: 293 - DNA, 20 bp, Artificial Sequence
  Description of Artificial Sequence: Synthetic oligonucleotide
ttgtcctgtccatggaagaa

SEQ ID NO: 294 - DNA, 20 bp, Artificial Sequence
  Description of Artificial Sequence: Synthetic oligonucleotide
ggaaccattcttccatggac

SEQ ID NO: 295 - DNA, 20 bp, Artificial Sequence
  Description of Artificial Sequence: Synthetic oligonucleotide
agcaagcatgatctttcgaa

SEQ ID NO: 296 - DNA, 20 bp, Artificial Sequence
  Description of Artificial Sequence: Synthetic oligonucleotide
tattacagatccacagatgt

SEQ ID NO: 297 - DNA, 20 bp, Artificial Sequence
  Description of Artificial Sequence: Synthetic oligonucleotide
tcatcaaaatcccacatctg

SEQ ID NO: 298 - DNA, 20 bp, Artificial Sequence
  Description of Artificial Sequence: Synthetic oligonucleotide
caggctcagcaggaacacta

SEQ ID NO: 299 - DNA, 20 bp, Artificial Sequence
  Description of Artificial Sequence: Synthetic oligonucleotide
cagcaggtagacatcagtga

SEQ ID NO: 300 - DNA, 20 bp, Artificial Sequence
  Description of Artificial Sequence: Synthetic oligonucleotide
tctcagtttctagcatacag

SEQ ID NO: 301 - DNA, 20 bp, Artificial Sequence
  Description of Artificial Sequence: Synthetic oligonucleotide
ggcggcatctagtagaaaag

SEQ ID NO: 302 - DNA, 20 bp, Artificial Sequence
  Description of Artificial Sequence: Synthetic oligonucleotide
ggtcagggcaaagagtaggt

SEQ ID NO: 303 - DNA, 20 bp, Artificial Sequence
  Description of Artificial Sequence: Synthetic oligonucleotide
caggctcagcaggaatacca

SEQ ID NO: 304 - DNA, 20 bp, Artificial Sequence
  Description of Artificial Sequence: Synthetic oligonucleotide
cagcaggtagacatcagtga

SEQ ID NO: 305 - DNA, 20 bp, Artificial Sequence
  Description of Artificial Sequence: Synthetic oligonucleotide
gcggcatctagtagaaaagg

SEQ ID NO: 306 - DNA, 20 bp, Artificial Sequence
  Description of Artificial Sequence: Synthetic oligonucleotide
cttctgggcagttgatgccg

SEQ ID NO: 307 - DNA, 20 bp, Artificial Sequence
  Description of Artificial Sequence: Synthetic oligonucleotide
agggaagcgtgatgacaaag

SEQ ID NO: 308 - DNA, 20 bp, Artificial Sequence
  Description of Artificial Sequence: Synthetic oligonucleotide
gcattttcttcacggaaaca

SEQ ID NO: 309 - DNA, 20 bp, Artificial Sequence
  Description of Artificial Sequence: Synthetic oligonucleotide
aggggactatgactccatga

SEQ ID NO: 310 - DNA, 20 bp, Artificial Sequence
  Description of Artificial Sequence: Synthetic oligonucleotide
gaagcgtgatgacaaagagg

SEQ ID NO: 311 - DNA, 20 bp, Artificial Sequence
  Description of Artificial Sequence: Synthetic oligonucleotide
tcgctgactctggcgcacac

SEQ ID NO: 312 - DNA, 20 bp, Artificial Sequence
  Description of Artificial Sequence: Synthetic oligonucleotide
tgggccaaaacaaataagct

SEQ ID NO: 313 - DNA, 20 bp, Artificial Sequence
  Description of Artificial Sequence: Synthetic oligonucleotide
gcctggtggacctagtcccc

SEQ ID NO: 314 - DNA, 20 bp, Artificial Sequence
  Description of Artificial Sequence: Synthetic oligonucleotide
ggtatcgccttcgctgactc

SEQ ID NO: 315 - DNA, 20 bp, Artificial Sequence
  Description of Artificial Sequence: Synthetic oligonucleotide
gattgtcggccaccaccagc

SEQ ID NO: 316 - DNA, 20 bp, Artificial Sequence
  Description of Artificial Sequence: Synthetic oligonucleotide
ccaattcccatgcagtagcc

SEQ ID NO: 317 - DNA, 20 bp, Artificial Sequence
  Description of Artificial Sequence: Synthetic oligonucleotide
cattatgtggaacatacttg

SEQ ID NO: 318 - DNA, 20 bp, Artificial Sequence
  Description of Artificial Sequence: Synthetic oligonucleotide
gcgagtctggatctctggag

SEQ ID NO: 319 - DNA, 20 bp, Artificial Sequence
  Description of Artificial Sequence: Synthetic oligonucleotide
gtgaccatacgaacaaggcc

SEQ ID NO: 320 - DNA, 20 bp, Artificial Sequence
  Description of Artificial Sequence: Synthetic oligonucleotide
tgtgaccatacgaacaaggc

SEQ ID NO: 321 - DNA, 20 bp, Artificial Sequence
  Description of Artificial Sequence: Synthetic oligonucleotide
tctcttggcggaaccgtcat

SEQ ID NO: 322 - DNA, 20 bp, Artificial Sequence
  Description of Artificial Sequence: Synthetic oligonucleotide
agataaatgatggaacctcc

SEQ ID NO: 323 - DNA, 20 bp, Artificial Sequence
  Description of Artificial Sequence: Synthetic oligonucleotide
tgtcttacaatgctccagct

SEQ ID NO: 324 - DNA, 20 bp, Artificial Sequence
  Description of Artificial Sequence: Synthetic oligonucleotide
cgatgccatgacctcctgca

SEQ ID NO: 325 - DNA, 20 bp, Artificial Sequence
  Description of Artificial Sequence: Synthetic oligonucleotide
tcactctggtggggacccag

SEQ ID NO: 326 - DNA, 20 bp, Artificial Sequence
  Description of Artificial Sequence: Synthetic oligonucleotide
gtagacatggtctggatagt

SEQ ID NO: 327 - DNA, 20 bp, Artificial Sequence
  Description of Artificial Sequence: Synthetic oligonucleotide
cctcccgctgctgtcatggt

SEQ ID NO: 328 - DNA, 20 bp, Artificial Sequence
  Description of Artificial Sequence: Synthetic oligonucleotide
gacatggtctggatagttgg

SEQ ID NO: 329 - DNA, 20 bp, Artificial Sequence
  Description of Artificial Sequence: Synthetic oligonucleotide
cgaaccaaccatgacagcag

SEQ ID NO: 330 - DNA, 20 bp, Artificial Sequence
  Description of Artificial Sequence: Synthetic oligonucleotide
ccaaccatgacagcagcggg

SEQ ID NO: 331 - DNA, 20 bp, Artificial Sequence
  Description of Artificial Sequence: Synthetic oligonucleotide
cctgggcgccagtgggccag

SEQ ID NO: 332 - DNA, 20 bp, Artificial Sequence
  Description of Artificial Sequence: Synthetic oligonucleotide
agcggaccctgggcgccagt

SEQ ID NO: 333 - DNA, 20 bp, Artificial Sequence
  Description of Artificial Sequence: Synthetic oligonucleotide
ttgtgcccggcgtgccagag

SEQ ID NO: 334 - DNA, 20 bp, Artificial Sequence
  Description of Artificial Sequence: Synthetic oligonucleotide
gccatggatacagcggacct

SEQ ID NO: 335 - DNA, 20 bp, Artificial Sequence
  Description of Artificial Sequence: Synthetic oligonucleotide
tagattggtcaggagagcca

SEQ ID NO: 336 - DNA, 20 bp, Artificial Sequence
  Description of Artificial Sequence: Synthetic oligonucleotide
caaggattccagttggattg

SEQ ID NO: 337 - DNA, 20 bp, Artificial Sequence
  Description of Artificial Sequence: Synthetic oligonucleotide
gtcagacaactgtaccatct

SEQ ID NO: 338 - DNA, 20 bp, Artificial Sequence
  Description of Artificial Sequence: Synthetic oligonucleotide
tggtgttcctgggcccacct

SEQ ID NO: 339 - DNA, 20 bp, Artificial Sequence
  Description of Artificial Sequence: Synthetic oligonucleotide
acttggttttgtcgctgaga

SEQ ID NO: 340 - DNA, 20 bp, Artificial Sequence
  Description of Artificial Sequence: Synthetic oligonucleotide
gcgacaaaaccaagtgggtg

SEQ ID NO: 341 - DNA, 20 bp, Artificial Sequence
  Description of Artificial Sequence: Synthetic oligonucleotide
cctgaggtttccgtttggca

SEQ ID NO: 342 - DNA, 20 bp, Artificial Sequence
  Description of Artificial Sequence: Synthetic oligonucleotide
ataaatgaatggtggatcac

SEQ ID NO: 343 - DNA, 20 bp, Artificial Sequence
  Description of Artificial Sequence: Synthetic oligonucleotide
actgaatgcacttgggaggg

SEQ ID NO: 344 - DNA, 20 bp, Artificial Sequence
  Description of Artificial Sequence: Synthetic oligonucleotide
ctgaatgcacttgggagggt

SEQ ID NO: 345 - DNA, 20 bp, Artificial Sequence
  Description of Artificial Sequence: Synthetic oligonucleotide
gaagcaggtcagtttgtgct

SEQ ID NO: 346 - DNA, 20 bp, Artificial Sequence
  Description of Artificial Sequence: Synthetic oligonucleotide
gtcgatagtgtgcaggtagt

SEQ ID NO: 347 - DNA, 20 bp, Artificial Sequence
  Description of Artificial Sequence: Synthetic oligonucleotide
cggcagcggccacgggtaga

SEQ ID NO: 348 - DNA, 20 bp, Artificial Sequence
  Description of Artificial Sequence: Synthetic oligonucleotide
cagaggtgcaaagggtttcg

SEQ ID NO: 349 - DNA, 20 bp, Artificial Sequence
  Description of Artificial Sequence: Synthetic oligonucleotide
agttggtggcagcagcaacc

SEQ ID NO: 350 - DNA, 20 bp, Artificial Sequence
  Description of Artificial Sequence: Synthetic oligonucleotide
atagtgatgtttgcagttgg

SEQ ID NO: 351 - DNA, 20 bp, Artificial Sequence
  Description of Artificial Sequence: Synthetic oligonucleotide
agttacagaatcacatggac

SEQ ID NO: 352 - DNA, 20 bp, Artificial Sequence
  Description of Artificial Sequence: Synthetic oligonucleotide
gtccatgtgattctgtaact

SEQ ID NO: 353 - DNA, 20 bp, Artificial Sequence
  Description of Artificial Sequence: Synthetic oligonucleotide
atgatgaatccagtggaaga

SEQ ID NO: 354 - DNA, 20 bp, Artificial Sequence
  Description of Artificial Sequence: Synthetic oligonucleotide
gattattcaatatctcctga

SEQ ID NO: 355 - DNA, 20 bp, Artificial Sequence
  Description of Artificial Sequence: Synthetic oligonucleotide
cccgtggttctgctgaacaa

SEQ ID NO: 356 - DNA, 20 bp, Artificial Sequence
  Description of Artificial Sequence: Synthetic oligonucleotide
ttcccgtctgacccgttgaa

SEQ ID NO: 357 - DNA, 20 bp, Artificial Sequence
  Description of Artificial Sequence: Synthetic oligonucleotide
cttcaacgggtcagacggga

SEQ ID NO: 358 - DNA, 20 bp, Artificial Sequence
  Description of Artificial Sequence: Synthetic oligonucleotide
cggcccttcaacgggtcaga

SEQ ID NO: 359 - DNA, 20 bp, Artificial Sequence
  Description of Artificial Sequence: Synthetic oligonucleotide
gaggctgacgatcaggtagt

SEQ ID NO: 360 - DNA, 20 bp, Artificial Sequence
  Description of Artificial Sequence: Synthetic oligonucleotide
tgtgtgccatcagcatcgac

SEQ ID NO: 361 - DNA, 20 bp, Artificial Sequence
  Description of Artificial Sequence: Synthetic oligonucleotide
tgggttgatgagtggtaacc

SEQ ID NO: 362 - DNA, 20 bp, Artificial Sequence
  Description of Artificial Sequence: Synthetic oligonucleotide
gaagtaattttagtctgctg

SEQ ID NO: 363 - DNA, 20 bp, Artificial Sequence
  Description of Artificial Sequence: Synthetic oligonucleotide
tccatcttgaggcaaatttg

SEQ ID NO: 364 - DNA, 20 bp, Artificial Sequence
  Description of Artificial Sequence: Synthetic oligonucleotide
attttcatcgtgggaatggt

SEQ ID NO: 365 - DNA, 20 bp, Artificial Sequence
  Description of Artificial Sequence: Synthetic oligonucleotide
tctgcgctcttagtgttgac

SEQ ID NO: 366 - DNA, 20 bp, Artificial Sequence
  Description of Artificial Sequence: Synthetic oligonucleotide
taaatgccaccggcaggatg

SEQ ID NO: 367 - DNA, 20 bp, Artificial Sequence
  Description of Artificial Sequence: Synthetic oligonucleotide
atcccaaggatgttatgttc

SEQ ID NO: 368 - DNA, 20 bp, Artificial Sequence
  Description of Artificial Sequence: Synthetic oligonucleotide
agctgtcggccccacaggct

SEQ ID NO: 369 - DNA, 20 bp, Artificial Sequence
  Description of Artificial Sequence: Synthetic oligonucleotide
ccttgcacgtggcttcgtct

SEQ ID NO: 370 - DNA, 20 bp, Artificial Sequence
  Description of Artificial Sequence: Synthetic oligonucleotide
gcagcgcccggagcactgct

SEQ ID NO: 371 - DNA, 20 bp, Artificial Sequence
  Description of Artificial Sequence: Synthetic oligonucleotide
tcccgttggatcaaagccct

SEQ ID NO: 372 - DNA, 20 bp, Artificial Sequence
  Description of Artificial Sequence: Synthetic oligonucleotide
cggtgagagatgctgctctc

SEQ ID NO: 373 - DNA, 20 bp, Artificial Sequence
  Description of Artificial Sequence: Synthetic oligonucleotide
ttgatccaacgggacctgct

SEQ ID NO: 374 - DNA, 20 bp, Artificial Sequence
  Description of Artificial Sequence: Synthetic oligonucleotide
ctccagcacatctggaccgt

SEQ ID NO: 375 - DNA, 20 bp, Artificial Sequence
  Description of Artificial Sequence: Synthetic oligonucleotide
agcactcccctccccaaggg

SEQ ID NO: 376 - DNA, 20 bp, Artificial Sequence
  Description of Artificial Sequence: Synthetic oligonucleotide
gaccatcccccggggtgacg

SEQ ID NO: 377 - DNA, 20 bp, Artificial Sequence
  Description of Artificial Sequence: Synthetic oligonucleotide
gagtgatgatgtccactcac

SEQ ID NO: 378 - DNA, 20 bp, Artificial Sequence
  Description of Artificial Sequence: Synthetic oligonucleotide
cgggccaagatgtcaatgac

SEQ ID NO: 379 - DNA, 20 bp, Artificial Sequence
  Description of Artificial Sequence: Synthetic oligonucleotide
gcctcatggtctcccgcttg

SEQ ID NO: 380 - DNA, 20 bp, Artificial Sequence
  Description of Artificial Sequence: Synthetic oligonucleotide
gaggagtgggagacggtggt

SEQ ID NO: 381 - DNA, 20 bp, Artificial Sequence
  Description of Artificial Sequence: Synthetic oligonucleotide
tcgcggcccccgctgtcctg

SEQ ID NO: 382 - DNA, 20 bp, Artificial Sequence
  Description of Artificial Sequence: Synthetic oligonucleotide
gtgtgcaaggcatcgacgct

SEQ ID NO: 383 - DNA, 20 bp, Artificial Sequence
  Description of Artificial Sequence: Synthetic oligonucleotide
gctcactgtcacactggtgc

SEQ ID NO: 384 - DNA, 20 bp, Artificial Sequence
  Description of Artificial Sequence: Synthetic oligonucleotide
gaggtggcaccctcagggga

SEQ ID NO: 385 - DNA, 20 bp, Artificial Sequence
  Description of Artificial Sequence: Synthetic oligonucleotide
cgtccagcgcagctccacct

SEQ ID NO: 386 - DNA, 20 bp, Artificial Sequence
  Description of Artificial Sequence: Synthetic oligonucleotide
gtgttagagtggctattggc

SEQ ID NO: 387 - DNA, 20 bp, Artificial Sequence
  Description of Artificial Sequence: Synthetic oligonucleotide
cagggctccaccaggtcccg

SEQ ID NO: 388 - DNA, 20 bp, Artificial Sequence
  Description of Artificial Sequence: Synthetic oligonucleotide
tcctgcagtgtctgacatcc

SEQ ID NO: 389 - DNA, 20 bp, Artificial Sequence
  Description of Artificial Sequence: Synthetic oligonucleotide
tccggggttcgaggcagctg

SEQ ID NO: 390 - DNA, 20 bp, Artificial Sequence
  Description of Artificial Sequence: Synthetic oligonucleotide
gctgtgatgttcctggccga

SEQ ID NO: 391 - DNA, 20 bp, Artificial Sequence
  Description of Artificial Sequence: Synthetic oligonucleotide
agctctccggcagaaatgcc

SEQ ID NO: 392 - DNA, 20 bp, Artificial Sequence
  Description of Artificial Sequence: Synthetic oligonucleotide
gccgaatgtataccggccct

SEQ ID NO: 393 - DNA, 20 bp, Artificial Sequence
  Description of Artificial Sequence: Synthetic oligonucleotide
ccagaacctgcaagtaatcc

SEQ ID NO: 394 - DNA, 20 bp, Artificial Sequence
  Description of Artificial Sequence: Synthetic oligonucleotide
ggagcacttgcgagaggtga

SEQ ID NO: 395 - DNA, 20 bp, Artificial Sequence
  Description of Artificial Sequence: Synthetic oligonucleotide
tgcgcccgagggcactgctg

SEQ ID NO: 396 - DNA, 20 bp, Artificial Sequence
  Description of Artificial Sequence: Synthetic oligonucleotide
gtggtagcagagctgcctat

SEQ ID NO: 397 - DNA, 20 bp, Artificial Sequence
  Description of Artificial Sequence: Synthetic oligonucleotide
ggcctgtcctcctgacaaga

SEQ ID NO: 398 - DNA, 20 bp, Artificial Sequence
  Description of Artificial Sequence: Synthetic oligonucleotide
actgtcattgaagtgccggc

SEQ ID NO: 399 - DNA, 20 bp, Artificial Sequence
  Description of Artificial Sequence: Synthetic oligonucleotide
cgtaggcccccgaagcacct

SEQ ID NO: 400 - DNA, 20 bp, Artificial Sequence
  Description of Artificial Sequence: Synthetic oligonucleotide
ccaacctccgcgtggtgcga

SEQ ID NO: 401 - DNA, 20 bp, Artificial Sequence
  Description of Artificial Sequence: Synthetic oligonucleotide
tgtgttccagtgatggctgt

SEQ ID NO: 402 - DNA, 20 bp, Artificial Sequence
  Description of Artificial Sequence: Synthetic oligonucleotide
ttttctaacctggtgaccat

SEQ ID NO: 403 - DNA, 20 bp, Artificial Sequence
  Description of Artificial Sequence: Synthetic oligonucleotide
ttctagtcactggtattcat

SEQ ID NO: 404 - DNA, 20 bp, Artificial Sequence
  Description of Artificial Sequence: Synthetic oligonucleotide
tggaggctgctcaggaccta

SEQ ID NO: 405 - DNA, 20 bp, Artificial Sequence
  Description of Artificial Sequence: Synthetic oligonucleotide
gcttgtgatggcattggcac

SEQ ID NO: 406 - DNA, 20 bp, Artificial Sequence
  Description of Artificial Sequence: Synthetic oligonucleotide
cccctacggccccgggtctg

SEQ ID NO: 407 - DNA, 20 bp, Artificial Sequence
  Description of Artificial Sequence: Synthetic oligonucleotide
agcctcagacccggggccgt

SEQ ID NO: 408 - DNA, 20 bp, Artificial Sequence
  Description of Artificial Sequence: Synthetic oligonucleotide
gctgcggcgttcggctccaa

SEQ ID NO: 409 - DNA, 20 bp, Artificial Sequence
  Description of Artificial Sequence: Synthetic oligonucleotide
aaattcagataatcgacgcc

SEQ ID NO: 410 - DNA, 20 bp, Artificial Sequence
  Description of Artificial Sequence: Synthetic oligonucleotide
cccttggatctgatgcagta

SEQ ID NO: 411 - DNA, 20 bp, Artificial Sequence
  Description of Artificial Sequence: Synthetic oligonucleotide
aactggcgatggaccactaa

SEQ ID NO: 412 - DNA, 20 bp, Artificial Sequence
  Description of Artificial Sequence: Synthetic oligonucleotide
tagcgatcttgcttcacacc

SEQ ID NO: 413 - DNA, 20 bp, Artificial Sequence
  Description of Artificial Sequence: Synthetic oligonucleotide
agtgtacaatcgataaaaac

SEQ ID NO: 414 - DNA, 20 bp, Artificial Sequence
  Description of Artificial Sequence: Synthetic oligonucleotide
aatgtgttgtggccaacacc

SEQ ID NO: 415 - DNA, 20 bp, Artificial Sequence
  Description of Artificial Sequence: Synthetic oligonucleotide
cagtaacagggctggcgcaa

SEQ ID NO: 416 - DNA, 20 bp, Artificial Sequence
  Description of Artificial Sequence: Synthetic oligonucleotide
gcaatgagctcacagaagtc

SEQ ID NO: 417 - DNA, 20 bp, Artificial Sequence
  Description of Artificial Sequence: Synthetic oligonucleotide
tttaatgggatgacttgtgt

SEQ ID NO: 418 - DNA, 20 bp, Artificial Sequence
  Description of Artificial Sequence: Synthetic oligonucleotide
ctcaccgaacagcagctccc

SEQ ID NO: 419 - DNA, 20 bp, Artificial Sequence
  Description of Artificial Sequence: Synthetic oligonucleotide
tgttggaaaatccaagtcac

SEQ ID NO: 420 - DNA, 20 bp, Artificial Sequence
  Description of Artificial Sequence: Synthetic oligonucleotide
acttctgtgagctcattgcg

SEQ ID NO: 421 - DNA, 20 bp, Artificial Sequence
  Description of Artificial Sequence: Synthetic oligonucleotide
gctgttgtctgcccgcaccc

SEQ ID NO: 422 - DNA, 20 bp, Artificial Sequence
  Description of Artificial Sequence: Synthetic oligonucleotide
ccattgtcccgggctctgcg

SEQ ID NO: 423 - DNA, 20 bp, Artificial Sequence
  Description of Artificial Sequence: Synthetic oligonucleotide
cgggtgcgggcagacaacag

SEQ ID NO: 424 - DNA, 20 bp, Artificial Sequence
  Description of Artificial Sequence: Synthetic oligonucleotide
gccgcctgcttcagtctgtg

SEQ ID NO: 425 - DNA, 20 bp, Artificial Sequence
  Description of Artificial Sequence: Synthetic oligonucleotide
ccgggacaatggggccgcgg

SEQ ID NO: 426 - DNA, 20 bp, Artificial Sequence
  Description of Artificial Sequence: Synthetic oligonucleotide
ctgggagcagctctacacag

SEQ ID NO: 427 - DNA, 20 bp, Artificial Sequence
  Description of Artificial Sequence: Synthetic oligonucleotide
tagagctgctcccaggcaga

SEQ ID NO: 428 - DNA, 20 bp, Artificial Sequence
  Description of Artificial Sequence: Synthetic oligonucleotide
accagcttggagacaacatg

SEQ ID NO: 429 - DNA, 20 bp, Artificial Sequence
  Description of Artificial Sequence: Synthetic oligonucleotide
aaccgtaaccttgcactgtg

SEQ ID NO: 430 - DNA, 20 bp, Artificial Sequence
  Description of Artificial Sequence: Synthetic oligonucleotide
gcatgacacctcaaggccag

SEQ ID NO: 431 - DNA, 20 bp, Artificial Sequence
  Description of Artificial Sequence: Synthetic oligonucleotide
ttccggatggcacagtggat

SEQ ID NO: 432 - DNA, 20 bp, Artificial Sequence
  Description of Artificial Sequence: Synthetic oligonucleotide
acttggccatggacaccgac

SEQ ID NO: 433 - DNA, 20 bp, Artificial Sequence
  Description of Artificial Sequence: Synthetic oligonucleotide
cagattaaacttctcggtca

SEQ ID NO: 434 - DNA, 20 bp, Artificial Sequence
  Description of Artificial Sequence: Synthetic oligonucleotide
tacttggccatggacaccga

SEQ ID NO: 435 - DNA, 20 bp, Artificial Sequence
  Description of Artificial Sequence: Synthetic oligonucleotide
ggcccccgttgctacagtag

SEQ ID NO: 436 - DNA, 20 bp, Artificial Sequence
  Description of Artificial Sequence: Synthetic oligonucleotide
ctgcccgccttgcccgagga

SEQ ID NO: 437 - DNA, 20 bp, Artificial Sequence
  Description of Artificial Sequence: Synthetic oligonucleotide
gccgcttggggtccttgaag

SEQ ID NO: 438 - DNA, 20 bp, Artificial Sequence
  Description of Artificial Sequence: Synthetic oligonucleotide
cggctgccatggtccctgcg

SEQ ID NO: 439 - DNA, 20 bp, Artificial Sequence
  Description of Artificial Sequence: Synthetic oligonucleotide
taaccgttacctggctatga

SEQ ID NO: 440 - DNA, 20 bp, Artificial Sequence
  Description of Artificial Sequence: Synthetic oligonucleotide
ttggggtccttgaagtggcc

SEQ ID NO: 441 - DNA, 20 bp, Artificial Sequence
  Description of Artificial Sequence: Synthetic oligonucleotide
aagcacctccatctctttgt

SEQ ID NO: 442 - DNA, 20 bp, Artificial Sequence
  Description of Artificial Sequence: Synthetic oligonucleotide
ggtttggggtcccactggaa

SEQ ID NO: 443 - DNA, 20 bp, Artificial Sequence
  Description of Artificial Sequence: Synthetic oligonucleotide
accctgcttgcaggatgggc

SEQ ID NO: 444 - DNA, 20 bp, Artificial Sequence
  Description of Artificial Sequence: Synthetic oligonucleotide
gactccgtgcccgcagactc

SEQ ID NO: 445 - DNA, 20 bp, Artificial Sequence
  Description of Artificial Sequence: Synthetic oligonucleotide
caaggtcggggacggcctag

SEQ ID NO: 446 - DNA, 20 bp, Artificial Sequence
  Description of Artificial Sequence: Synthetic oligonucleotide
caagtttcgctgcccagccg

SEQ ID NO: 447 - DNA, 20 bp, Artificial Sequence
  Description of Artificial Sequence: Synthetic oligonucleotide
cgcacctctagcgactcccc

SEQ ID NO: 448 - DNA, 20 bp, Artificial Sequence
  Description of Artificial Sequence: Synthetic oligonucleotide
accccagctgaccatggtta

SEQ ID NO: 449 - DNA, 20 bp, Artificial Sequence
  Description of Artificial Sequence: Synthetic oligonucleotide
ggttggcattgggttccccc

SEQ ID NO: 450 - DNA, 20 bp, Artificial Sequence
  Description of Artificial Sequence: Synthetic oligonucleotide
caccggcccatcctccaagc

SEQ ID NO: 451 - DNA, 20 bp, Artificial Sequence
  Description of Artificial Sequence: Synthetic oligonucleotide
ggggacggagcagcgcgtcg

SEQ ID NO: 452 - DNA, 20 bp, Artificial Sequence
  Description of Artificial Sequence: Synthetic oligonucleotide
gcggaagcggacggtgttgg

SEQ ID NO: 453 - DNA, 20 bp, Artificial Sequence
  Description of Artificial Sequence: Synthetic oligonucleotide
aatagaattgcccgccaggc

SEQ ID NO: 454 - DNA, 20 bp, Artificial Sequence
  Description of Artificial Sequence: Synthetic oligonucleotide
cttcggcagcggggatgctg

SEQ ID NO: 455 - DNA, 20 bp, Artificial Sequence
  Description of Artificial Sequence: Synthetic oligonucleotide
actccggggcctacagctgc

SEQ ID NO: 456 - DNA, 20 bp, Artificial Sequence
  Description of Artificial Sequence: Synthetic oligonucleotide
gatggagagcgtggtgccct

SEQ ID NO: 457 - DNA, 20 bp, Artificial Sequence
  Description of Artificial Sequence: Synthetic oligonucleotide
cgctacctctgcctggcacg

SEQ ID NO: 458 - DNA, 20 bp, Artificial Sequence
  Description of Artificial Sequence: Synthetic oligonucleotide
gccagcggatggtgggcgtg

SEQ ID NO: 459 - DNA, 20 bp, Artificial Sequence
  Description of Artificial Sequence: Synthetic oligonucleotide
agctggacagcggaacttga

SEQ ID NO: 460 - DNA, 20 bp, Artificial Sequence
  Description of Artificial Sequence: Synthetic oligonucleotide
gtacacggccagcaggtgcc

SEQ ID NO: 461 - DNA, 20 bp, Artificial Sequence
  Description of Artificial Sequence: Synthetic oligonucleotide
gagaggcagctgctttcacc

SEQ ID NO: 462 - DNA, 20 bp, Artificial Sequence
  Description of Artificial Sequence: Synthetic oligonucleotide
ctttcaccaggcaaccccca

SEQ ID NO: 463 - DNA, 20 bp, Artificial Sequence
  Description of Artificial Sequence: Synthetic oligonucleotide
atgtgggcaaatgaggatgc

SEQ ID NO: 464 - DNA, 20 bp, Artificial Sequence
  Description of Artificial Sequence: Synthetic oligonucleotide
ctcgctttcccgaatgagaa

SEQ ID NO: 465 - DNA, 20 bp, Artificial Sequence
  Description of Artificial Sequence: Synthetic oligonucleotide
gaggctcggtctctcagctc

SEQ ID NO: 466 - DNA, 20 bp, Artificial Sequence
  Description of Artificial Sequence: Synthetic oligonucleotide
gggcgcaccttccccaagcg

SEQ ID NO: 467 - DNA, 20 bp, Artificial Sequence
  Description of Artificial Sequence: Synthetic oligonucleotide
tcagcgtccgccgccgccat

SEQ ID NO: 468 - DNA, 20 bp, Artificial Sequence
  Description of Artificial Sequence: Synthetic oligonucleotide
cgcaggtctggccgcgcttg

SEQ ID NO: 469 - DNA, 20 bp, Artificial Sequence
  Description of Artificial Sequence: Synthetic oligonucleotide
cacctgcactcccatggcgg

SEQ ID NO: 470 - DNA, 20 bp, Artificial Sequence
  Description of Artificial Sequence: Synthetic oligonucleotide
caagcgcggccagacctgcg

SEQ ID NO: 471 - DNA, 20 bp, Artificial Sequence
  Description of Artificial Sequence: Synthetic oligonucleotide
gtaagaccgcttgccagcta

SEQ ID NO: 472 - DNA, 20 bp, Artificial Sequence
  Description of Artificial Sequence: Synthetic oligonucleotide
tccccgagcctcagatcact

SEQ ID NO: 473 - DNA, 20 bp, Artificial Sequence
  Description of Artificial Sequence: Synthetic oligonucleotide
gttaggtgacgtaacccggc

SEQ ID NO: 474 - DNA, 20 bp, Artificial Sequence
  Description of Artificial Sequence: Synthetic oligonucleotide
cttgacactttgatccctga

SEQ ID NO: 475 - DNA, 20 bp, Artificial Sequence
  Description of Artificial Sequence: Synthetic oligonucleotide
caggtgcttgaaaccgtagc

SEQ ID NO: 476 - DNA, 20 bp, Artificial Sequence
  Description of Artificial Sequence: Synthetic oligonucleotide
gtccacgtacatctgatttg

SEQ ID NO: 477 - DNA, 20 bp, Artificial Sequence
  Description of Artificial Sequence: Synthetic oligonucleotide
ggtaaccaaagctgattgac

SEQ ID NO: 478 - DNA, 20 bp, Artificial Sequence
  Description of Artificial Sequence: Synthetic oligonucleotide
tccacgtacatctgatttgt

SEQ ID NO: 479 - DNA, 20 bp, Artificial Sequence
  Description of Artificial Sequence: Synthetic oligonucleotide
cccaggtgagcccgaatcca

SEQ ID NO: 480 - DNA, 20 bp, Artificial Sequence
  Description of Artificial Sequence: Synthetic oligonucleotide
gagcaaaagggtcttgataa

SEQ ID NO: 481 - DNA, 20 bp, Artificial Sequence
  Description of Artificial Sequence: Synthetic oligonucleotide
gacgtagctgcctgtgtcgt

SEQ ID NO: 482 - DNA, 20 bp, Artificial Sequence
  Description of Artificial Sequence: Synthetic oligonucleotide
gtcaagttctgcgtgagccg

SEQ ID NO: 483 - DNA, 20 bp, Artificial Sequence
  Description of Artificial Sequence: Synthetic oligonucleotide
cccgtaggccgtgcaggtga

SEQ ID NO: 484 - DNA, 20 bp, Artificial Sequence
  Description of Artificial Sequence: Synthetic oligonucleotide
ggcatgtggactgtggcgcc

SEQ ID NO: 485 - DNA, 20 bp, Artificial Sequence
  Description of Artificial Sequence: Synthetic oligonucleotide
tctttgtaccacacgatgct

SEQ ID NO: 486 - DNA, 20 bp, Artificial Sequence
  Description of Artificial Sequence: Synthetic oligonucleotide
gtgacttcaaaagaactctc

SEQ ID NO: 487 - DNA, 20 bp, Artificial Sequence
  Description of Artificial Sequence: Synthetic oligonucleotide
ctacatcactgcaataattg

SEQ ID NO: 488 - DNA, 20 bp, Artificial Sequence
  Description of Artificial Sequence: Synthetic oligonucleotide
tgtggaccaacttctgaaag

SEQ ID NO: 489 - DNA, 20 bp, Artificial Sequence
  Description of Artificial Sequence: Synthetic oligonucleotide
gggtcggggaggctgcgcaa

SEQ ID NO: 490 - DNA, 20 bp, Artificial Sequence
  Description of Artificial Sequence: Synthetic oligonucleotide
tcttttgaagtcacttcaga

SEQ ID NO: 491 - DNA, 20 bp, Artificial Sequence
  Description of Artificial Sequence: Synthetic oligonucleotide
cccgcgctggctgtgcgctg

SEQ ID NO: 492 - DNA, 20 bp, Artificial Sequence
  Description of Artificial Sequence: Synthetic oligonucleotide
tcacgaaaccgactcggctg

SEQ ID NO: 493 - DNA, 20 bp, Artificial Sequence
  Description of Artificial Sequence: Synthetic oligonucleotide
gtgctagctcaacagaatcc

SEQ ID NO: 494 - DNA, 20 bp, Artificial Sequence
  Description of Artificial Sequence: Synthetic oligonucleotide
tctccttcacgaaaccgact

SEQ ID NO: 495 - DNA, 20 bp, Artificial Sequence
  Description of Artificial Sequence: Synthetic oligonucleotide
cagccgagtcggtttcgtga

SEQ ID NO: 496 - DNA, 20 bp, Artificial Sequence
  Description of Artificial Sequence: Synthetic oligonucleotide
agtgtgggtggctgtagtag

SEQ ID NO: 497 - DNA, 20 bp, Artificial Sequence
  Description of Artificial Sequence: Synthetic oligonucleotide
atgaaatgccgtttgcaggc

SEQ ID NO: 498 - DNA, 20 bp, Artificial Sequence
  Description of Artificial Sequence: Synthetic oligonucleotide
ccagttgaatctatataggt

SEQ ID NO: 499 - DNA, 20 bp, Artificial Sequence
  Description of Artificial Sequence: Synthetic oligonucleotide
ctgcaaacggcatttcatcc

SEQ ID NO: 500 - DNA, 20 bp, Artificial Sequence
  Description of Artificial Sequence: Synthetic oligonucleotide
gacattgagaagctcagtcc

SEQ ID NO: 501 - DNA, 20 bp, Artificial Sequence
  Description of Artificial Sequence: Synthetic oligonucleotide
ctgggaccactgcggcaaga

SEQ ID NO: 502 - DNA, 20 bp, Artificial Sequence
  Description of Artificial Sequence: Synthetic oligonucleotide
cgggctccatcttgccgcag

SEQ ID NO: 503 - DNA, 20 bp, Artificial Sequence
  Description of Artificial Sequence: Synthetic oligonucleotide
tggcatccatacagacattg

SEQ ID NO: 504 - DNA, 20 bp, Artificial Sequence
  Description of Artificial Sequence: Synthetic oligonucleotide
gtcctgggcactgcacatgg

SEQ ID NO: 505 - DNA, 20 bp, Artificial Sequence
  Description of Artificial Sequence: Synthetic oligonucleotide
tgatctcctcaatgtctgta

SEQ ID NO: 506 - DNA, 20 bp, Artificial Sequence
  Description of Artificial Sequence: Synthetic oligonucleotide
cctggggccctggatccggc

SEQ ID NO: 507 - DNA, 20 bp, Artificial Sequence
  Description of Artificial Sequence: Synthetic oligonucleotide
ataaagtggcgcttgcaggt

SEQ ID NO: 508 - DNA, 20 bp, Artificial Sequence
  Description of Artificial Sequence: Synthetic oligonucleotide
ggccatacagctcgtcctcg

SEQ ID NO: 509 - DNA, 20 bp, Artificial Sequence
  Description of Artificial Sequence: Synthetic oligonucleotide
tggctttggtgactgctgcg

SEQ ID NO: 510 - DNA, 20 bp, Artificial Sequence
  Description of Artificial Sequence: Synthetic oligonucleotide
gttaaagttgtacaggcggg

SEQ ID NO: 511 - DNA, 20 bp, Artificial Sequence
  Description of Artificial Sequence: Synthetic oligonucleotide
agatgttgctcattgtgcct

SEQ ID NO: 512 - DNA, 20 bp, Artificial Sequence
  Description of Artificial Sequence: Synthetic oligonucleotide
ggctgaggacagaagcctac

SEQ ID NO: 513 - DNA, 20 bp, Artificial Sequence
  Description of Artificial Sequence: Synthetic oligonucleotide
tcaaccgtgattgaaaatcc

SEQ ID NO: 514 - DNA, 20 bp, Artificial Sequence
  Description of Artificial Sequence: Synthetic oligonucleotide
gttgctcattgtgccttggt

SEQ ID NO: 515 - DNA, 20 bp, Artificial Sequence
  Description of Artificial Sequence: Synthetic oligonucleotide
ggctccagtcagcaactaca

SEQ ID NO: 516 - DNA, 20 bp, Artificial Sequence
  Description of Artificial Sequence: Synthetic oligonucleotide
cgaagctggggtagtgctga

SEQ ID NO: 517 - DNA, 20 bp, Artificial Sequence
  Description of Artificial Sequence: Synthetic oligonucleotide
ttacattcccagcaattatg

SEQ ID NO: 518 - DNA, 20 bp, Artificial Sequence
  Description of Artificial Sequence: Synthetic oligonucleotide
gtccttggcccccggctgcg

SEQ ID NO: 519 - DNA, 20 bp, Artificial Sequence
  Description of Artificial Sequence: Synthetic oligonucleotide
ccgaagctggggtagtgctg

SEQ ID NO: 520 - DNA, 20 bp, Artificial Sequence
  Description of Artificial Sequence: Synthetic oligonucleotide
aatgggctgtgtgcaatgta

SEQ ID NO: 521 - DNA, 20 bp, Artificial Sequence
  Description of Artificial Sequence: Synthetic oligonucleotide
gcgccgctcatgcgccagta

SEQ ID NO: 522 - DNA, 20 bp, Artificial Sequence
  Description of Artificial Sequence: Synthetic oligonucleotide
gcagcgctctagcggcgctg

SEQ ID NO: 523 - DNA, 20 bp, Artificial Sequence
  Description of Artificial Sequence: Synthetic oligonucleotide
gaggcgcacagcatggagtg

SEQ ID NO: 524 - DNA, 20 bp, Artificial Sequence
  Description of Artificial Sequence: Synthetic oligonucleotide
gatgcccttacacagcggca

SEQ ID NO: 525 - DNA, 20 bp, Artificial Sequence
  Description of Artificial Sequence: Synthetic oligonucleotide
tagccgatgcccttacacag

SEQ ID NO: 526 - DNA, 20 bp, Artificial Sequence
  Description of Artificial Sequence: Synthetic oligonucleotide
tcgcttatggtcctgtgctg

SEQ ID NO: 527 - DNA, 20 bp, Artificial Sequence
  Description of Artificial Sequence: Synthetic oligonucleotide
caccgccctaactgttgtca

SEQ ID NO: 528 - DNA, 20 bp, Artificial Sequence
  Description of Artificial Sequence: Synthetic oligonucleotide
ggaataatgctgaccaagaa

SEQ ID NO: 529 - DNA, 20 bp, Artificial Sequence
  Description of Artificial Sequence: Synthetic oligonucleotide
aaacaagtgttggttgcccc

SEQ ID NO: 530 - DNA, 20 bp, Artificial Sequence
  Description of Artificial Sequence: Synthetic oligonucleotide
cgcttatggtcctgtgctgg

SEQ ID NO: 531 - DNA, 20 bp, Artificial Sequence
  Description of Artificial Sequence: Synthetic oligonucleotide
tcctccagggcgcagtccat

SEQ ID NO: 532 - DNA, 20 bp, Artificial Sequence
  Description of Artificial Sequence: Synthetic oligonucleotide
ctactgacttggtgcgtgga

SEQ ID NO: 533 - DNA, 20 bp, Artificial Sequence
  Description of Artificial Sequence: Synthetic oligonucleotide
tattctactgacttggtgcg

SEQ ID NO: 534 - DNA, 20 bp, Artificial Sequence
  Description of Artificial Sequence: Synthetic oligonucleotide
agctcctttcaggtctcgga

SEQ ID NO: 535 - DNA, 20 bp, Artificial Sequence
  Description of Artificial Sequence: Synthetic oligonucleotide
gggagaacgtggctggtgcg

SEQ ID NO: 536 - DNA, 20 bp, Artificial Sequence
  Description of Artificial Sequence: Synthetic oligonucleotide
ctgattgtcatgccactgga

SEQ ID NO: 537 - DNA, 20 bp, Artificial Sequence
  Description of Artificial Sequence: Synthetic oligonucleotide
tcatgccactggatgggatg

SEQ ID NO: 538 - DNA, 20 bp, Artificial Sequence
  Description of Artificial Sequence: Synthetic oligonucleotide
gtaactctccagcataccat

SEQ ID NO: 539 - DNA, 20 bp, Artificial Sequence
  Description of Artificial Sequence: Synthetic oligonucleotide
tgattgtcatgccactggat

SEQ ID NO: 540 - DNA, 20 bp, Artificial Sequence
  Description of Artificial Sequence: Synthetic oligonucleotide
aaagacactactgaggatcc

SEQ ID NO: 541 - DNA, 20 bp, Artificial Sequence
  Description of Artificial Sequence: Synthetic oligonucleotide
tacacggacatcaaagtgat

SEQ ID NO: 542 - DNA, 20 bp, Artificial Sequence
  Description of Artificial Sequence: Synthetic oligonucleotide
ctctgggccttggcctagag

SEQ ID NO: 543 - DNA, 20 bp, Artificial Sequence
  Description of Artificial Sequence: Synthetic oligonucleotide
cactagcttcccgccgcccg

SEQ ID NO: 544 - DNA, 20 bp, Artificial Sequence
  Description of Artificial Sequence: Synthetic oligonucleotide
ttggggtcgtgtaccaggca

SEQ ID NO: 545 - DNA, 20 bp, Artificial Sequence
  Description of Artificial Sequence: Synthetic oligonucleotide
tcacggcccagcttcacccc

SEQ ID NO: 546 - DNA, 20 bp, Artificial Sequence
  Description of Artificial Sequence: Synthetic oligonucleotide
cgttatttcttctactccag

SEQ ID NO: 547 - DNA, 20 bp, Artificial Sequence
  Description of Artificial Sequence: Synthetic oligonucleotide
cggcttgcagctctccgcaa

SEQ ID NO: 548 - DNA, 20 bp, Artificial Sequence
  Description of Artificial Sequence: Synthetic oligonucleotide
ctcctgggcagggtccagac

SEQ ID NO: 549 - DNA, 20 bp, Artificial Sequence
  Description of Artificial Sequence: Synthetic oligonucleotide
ttcatgctgccaaaagctga

SEQ ID NO: 550 - DNA, 20 bp, Artificial Sequence
  Description of Artificial Sequence: Synthetic oligonucleotide
caacagtggtggcaactcct

SEQ ID NO: 551 - DNA, 20 bp, Artificial Sequence
  Description of Artificial Sequence: Synthetic oligonucleotide
gctgcccgcgagacgaggag

SEQ ID NO: 552 - DNA, 20 bp, Artificial Sequence
  Description of Artificial Sequence: Synthetic oligonucleotide
aggacagtgtgggctggcgc

SEQ ID NO: 553 - DNA, 20 bp, Artificial Sequence
  Description of Artificial Sequence: Synthetic oligonucleotide
aggctcgatccctggccacc

SEQ ID NO: 554 - DNA, 20 bp, Artificial Sequence
  Description of Artificial Sequence: Synthetic oligonucleotide
agaatgtattgcctccgacc

SEQ ID NO: 555 - DNA, 20 bp, Artificial Sequence
  Description of Artificial Sequence: Synthetic oligonucleotide
gcgcccgctcctcgtctcgc

SEQ ID NO: 556 - DNA, 20 bp, Artificial Sequence
  Description of Artificial Sequence: Synthetic oligonucleotide
ttcggtgaggcttcattggg

SEQ ID NO: 557 - DNA, 20 bp, Artificial Sequence
  Description of Artificial Sequence: Synthetic oligonucleotide
cccaggaactggggacctac

SEQ ID NO: 558 - DNA, 20 bp, Artificial Sequence
  Description of Artificial Sequence: Synthetic oligonucleotide
agtagtaacagactttcctc

SEQ ID NO: 559 - DNA, 20 bp, Artificial Sequence
  Description of Artificial Sequence: Synthetic oligonucleotide
gtactctccatacttatgaa

SEQ ID NO: 560 - DNA, 20 bp, Artificial Sequence
  Description of Artificial Sequence: Synthetic oligonucleotide
ttacgtcaatgatatcgtct

SEQ ID NO: 561 - DNA, 20 bp, Artificial Sequence
  Description of Artificial Sequence: Synthetic oligonucleotide
gtgtagcccgtgtttctgct

SEQ ID NO: 562 - DNA, 20 bp, Artificial Sequence
  Description of Artificial Sequence: Synthetic oligonucleotide
ctcccgggcaccatggccag

SEQ ID NO: 563 - DNA, 20 bp, Artificial Sequence
  Description of Artificial Sequence: Synthetic oligonucleotide
tgtgcaaaatgggcttgccc

SEQ ID NO: 564 - DNA, 20 bp, Artificial Sequence
  Description of Artificial Sequence: Synthetic oligonucleotide
gagtcagatgcagacgcagt

SEQ ID NO: 565 - DNA, 20 bp, Artificial Sequence
  Description of Artificial Sequence: Synthetic oligonucleotide
cagcgtttcccatcccaacc

SEQ ID NO: 566 - DNA, 20 bp, Artificial Sequence
  Description of Artificial Sequence: Synthetic oligonucleotide
caacatcaccttcatgggcc

SEQ ID NO: 567 - DNA, 20 bp, Artificial Sequence
  Description of Artificial Sequence: Synthetic oligonucleotide
caaagggatgcagcttctcc

SEQ ID NO: 568 - DNA, 20 bp, Artificial Sequence
  Description of Artificial Sequence: Synthetic oligonucleotide
ccctttgatgccggaaaatg

SEQ ID NO: 569 - DNA, 20 bp, Artificial Sequence
  Description of Artificial Sequence: Synthetic oligonucleotide
aagctgcatccctttgatgc

SEQ ID NO: 570 - DNA, 20 bp, Artificial Sequence
  Description of Artificial Sequence: Synthetic oligonucleotide
aacgggggggatttctgtga

SEQ ID NO: 571 - DNA, 20 bp, Artificial Sequence
  Description of Artificial Sequence: Synthetic oligonucleotide
gatatggctgttaattgggc

SEQ ID NO: 572 - DNA, 20 bp, Artificial Sequence
  Description of Artificial Sequence: Synthetic oligonucleotide
gagcccatggcgtacagtca

SEQ ID NO: 573 - DNA, 20 bp, Artificial Sequence
  Description of Artificial Sequence: Synthetic oligonucleotide
ggggaatactttcctggcac

SEQ ID NO: 574 - DNA, 20 bp, Artificial Sequence
  Description of Artificial Sequence: Synthetic oligonucleotide
tcttcggcagtggctttatg

SEQ ID NO: 575 - DNA, 20 bp, Artificial Sequence
  Description of Artificial Sequence: Synthetic oligonucleotide
ttcctggcacaggagacttg

SEQ ID NO: 576 - DNA, 20 bp, Artificial Sequence
  Description of Artificial Sequence: Synthetic oligonucleotide
cgagcagaactcaaagagcc

SEQ ID NO: 577 - DNA, 20 bp, Artificial Sequence
  Description of Artificial Sequence: Synthetic oligonucleotide
tcatgttgggaggcctggta

SEQ ID NO: 578 - DNA, 20 bp, Artificial Sequence
  Description of Artificial Sequence: Synthetic oligonucleotide
tggtggggctgactctctgc

SEQ ID NO: 579 - DNA, 20 bp, Artificial Sequence
  Description of Artificial Sequence: Synthetic oligonucleotide
ccaggcgatggggcttcata

SEQ ID NO: 580 - DNA, 20 bp, Artificial Sequence
  Description of Artificial Sequence: Synthetic oligonucleotide
gatattgccattaactgggc

SEQ ID NO: 581 - DNA, 20 bp, Artificial Sequence
  Description of Artificial Sequence: Synthetic oligonucleotide
gtcgacactccgctctgggg

SEQ ID NO: 582 - DNA, 20 bp, Artificial Sequence
  Description of Artificial Sequence: Synthetic oligonucleotide
gcctggggcgctgctgcacg

SEQ ID NO: 583 - DNA, 20 bp, Artificial Sequence
  Description of Artificial Sequence: Synthetic oligonucleotide
gtgacgaggggtgcttgtgc

SEQ ID NO: 584 - DNA, 20 bp, Artificial Sequence
  Description of Artificial Sequence: Synthetic oligonucleotide
caagggcgaggtgctcaggt

SEQ ID NO: 585 - DNA, 20 bp, Artificial Sequence
  Description of Artificial Sequence: Synthetic oligonucleotide
ctccacgcacagtccttggt

SEQ ID NO: 586 - DNA, 20 bp, Artificial Sequence
  Description of Artificial Sequence: Synthetic oligonucleotide
tgtgcagagaagtccgcggc

SEQ ID NO: 587 - DNA, 20 bp, Artificial Sequence
  Description of Artificial Sequence: Synthetic oligonucleotide
agcagggaggcatgcccgtg

SEQ ID NO: 588 - DNA, 20 bp, Artificial Sequence
  Description of Artificial Sequence: Synthetic oligonucleotide
cgggcagtccccactagtga

SEQ ID NO: 589 - DNA, 20 bp, Artificial Sequence
  Description of Artificial Sequence: Synthetic oligonucleotide
gccctccagtccctgcggca

SEQ ID NO: 590 - DNA, 20 bp, Artificial Sequence
  Description of Artificial Sequence: Synthetic oligonucleotide
cacgttcacccgtcactagt

SEQ ID NO: 591 - DNA, 20 bp, Artificial Sequence
  Description of Artificial Sequence: Synthetic oligonucleotide
gttagctgggcgaaccctgc

SEQ ID NO: 592 - DNA, 20 bp, Artificial Sequence
  Description of Artificial Sequence: Synthetic oligonucleotide
ctggttccaaggcacattga

SEQ ID NO: 593 - DNA, 20 bp, Artificial Sequence
  Description of Artificial Sequence: Synthetic oligonucleotide
ctgagtcgtaggtgtctgct

SEQ ID NO: 594 - DNA, 20 bp, Artificial Sequence
  Description of Artificial Sequence: Synthetic oligonucleotide
gatataccatcaatgtgcct

SEQ ID NO: 595 - DNA, 20 bp, Artificial Sequence
  Description of Artificial Sequence: Synthetic oligonucleotide
cttgaggctgaagcactggc

SEQ ID NO: 596 - DNA, 20 bp, Artificial Sequence
  Description of Artificial Sequence: Synthetic oligonucleotide
tgaccaccgagcggctctct

SEQ ID NO: 597 - DNA, 20 bp, Artificial Sequence
  Description of Artificial Sequence: Synthetic oligonucleotide
gtgggcacccgggctcacct

SEQ ID NO: 598 - DNA, 20 bp, Artificial Sequence
  Description of Artificial Sequence: Synthetic oligonucleotide
taaggactgggcaaagtgga

SEQ ID NO: 599 - DNA, 20 bp, Artificial Sequence
  Description of Artificial Sequence: Synthetic oligonucleotide
ggctgcagtagtgggcaccc

SEQ ID NO: 600 - DNA, 20 bp, Artificial Sequence
  Description of Artificial Sequence: Synthetic oligonucleotide
cagcggggcatgagagcctg

SEQ ID NO: 601 - DNA, 20 bp, Artificial Sequence
  Description of Artificial Sequence: Synthetic oligonucleotide
gctgcccaatgcctgattga

SEQ ID NO: 602 - DNA, 20 bp, Artificial Sequence
  Description of Artificial Sequence: Synthetic oligonucleotide
acattccgtcaatcaggcat

SEQ ID NO: 603 - DNA, 20 bp, Artificial Sequence
  Description of Artificial Sequence: Synthetic oligonucleotide
cattccgtcaatcaggcatt

SEQ ID NO: 604 - DNA, 20 bp, Artificial Sequence
  Description of Artificial Sequence: Synthetic oligonucleotide
atccggactccatagaatat

SEQ ID NO: 605 - DNA, 20 bp, Artificial Sequence
  Description of Artificial Sequence: Synthetic oligonucleotide
cctggccaagatccccaaac

SEQ ID NO: 606 - DNA, 20 bp, Artificial Sequence
  Description of Artificial Sequence: Synthetic oligonucleotide
aggtctgtccttaggtctaa

SEQ ID NO: 607 - DNA, 20 bp, Artificial Sequence
  Description of Artificial Sequence: Synthetic oligonucleotide
ctaaaggtgagatgggctcc

SEQ ID NO: 608 - DNA, 20 bp, Artificial Sequence
  Description of Artificial Sequence: Synthetic oligonucleotide
cttaggtctaaaggtgagat

SEQ ID NO: 609 - DNA, 20 bp, Artificial Sequence
  Description of Artificial Sequence: Synthetic oligonucleotide
ccatctcacctttagaccta

SEQ ID NO: 610 - DNA, 20 bp, Artificial Sequence
  Description of Artificial Sequence: Synthetic oligonucleotide
tcagcttcaggagcatatca

SEQ ID NO: 611 - DNA, 20 bp, Artificial Sequence
  Description of Artificial Sequence: Synthetic oligonucleotide
gtcgccataacggagccggc

SEQ ID NO: 612 - DNA, 20 bp, Artificial Sequence
  Description of Artificial Sequence: Synthetic oligonucleotide
gcgggtcgccataacggagc

SEQ ID NO: 613 - DNA, 20 bp, Artificial Sequence
  Description of Artificial Sequence: Synthetic oligonucleotide
ctcatggactaattatggac

SEQ ID NO: 614 - DNA, 20 bp, Artificial Sequence
  Description of Artificial Sequence: Synthetic oligonucleotide
aaaatctacagtcataggaa

SEQ ID NO: 615 - DNA, 20 bp, Artificial Sequence
  Description of Artificial Sequence: Synthetic oligonucleotide
gccccccttgagcacacaga

SEQ ID NO: 616 - DNA, 20 bp, Artificial Sequence
  Description of Artificial Sequence: Synthetic oligonucleotide
ctggcaatctcaagtcaacc

SEQ ID NO: 617 - DNA, 20 bp, Artificial Sequence
  Description of Artificial Sequence: Synthetic oligonucleotide
ccttggaagagcagtagtcc

SEQ ID NO: 618 - DNA, 20 bp, Artificial Sequence
  Description of Artificial Sequence: Synthetic oligonucleotide
tggcgtcaatggtgacggac

SEQ ID NO: 619 - DNA, 20 bp, Artificial Sequence
  Description of Artificial Sequence: Synthetic oligonucleotide
acgacgtcctgtgcttgcgc

SEQ ID NO: 620 - DNA, 20 bp, Artificial Sequence
  Description of Artificial Sequence: Synthetic oligonucleotide
cattgacgccaacctggcca

SEQ ID NO: 621 - DNA, 20 bp, Artificial Sequence
  Description of Artificial Sequence: Synthetic oligonucleotide
acgatgatgagcagtacgct

SEQ ID NO: 622 - DNA, 20 bp, Artificial Sequence
  Description of Artificial Sequence: Synthetic oligonucleotide
gatcaaaaggagcacgtcgt

SEQ ID NO: 623 - DNA, 20 bp, Artificial Sequence
  Description of Artificial Sequence: Synthetic oligonucleotide
tctcacgggatatgtttaga

SEQ ID NO: 624 - DNA, 20 bp, Artificial Sequence
  Description of Artificial Sequence: Synthetic oligonucleotide
agatcaaaaggagcacgtcg

SEQ ID NO: 625 - DNA, 20 bp, Artificial Sequence
  Description of Artificial Sequence: Synthetic oligonucleotide
cgatgatgagcagtacgctt

SEQ ID NO: 626 - DNA, 20 bp, Artificial Sequence
  Description of Artificial Sequence: Synthetic oligonucleotide
caccacctactcctgcgtgg

SEQ ID NO: 627 - DNA, 20 bp, Artificial Sequence
  Description of Artificial Sequence: Synthetic oligonucleotide
gtgttggaacacccccacgc

SEQ ID NO: 628 - DNA, 20 bp, Artificial Sequence
  Description of Artificial Sequence: Synthetic oligonucleotide
gaccaaggcattctaccccg

SEQ ID NO: 629 - DNA, 20 bp, Artificial Sequence
  Description of Artificial Sequence: Synthetic oligonucleotide
caacgacggagacaagccca

SEQ ID NO: 630 - DNA, 20 bp, Artificial Sequence
  Description of Artificial Sequence: Synthetic oligonucleotide
ggacaccgagcggctcatcg

SEQ ID NO: 631 - DNA, 20 bp, Artificial Sequence
  Description of Artificial Sequence: Synthetic oligonucleotide
caggtcgatgccgatcgccg

SEQ ID NO: 632 - DNA, 20 bp, Artificial Sequence
  Description of Artificial Sequence: Synthetic oligonucleotide
caccacctactcctgcgtgg

SEQ ID NO: 633 - DNA, 20 bp, Artificial Sequence
  Description of Artificial Sequence: Synthetic oligonucleotide
gtgttggaacacccccacgc

SEQ ID NO: 634 - DNA, 20 bp, Artificial Sequence
  Description of Artificial Sequence: Synthetic oligonucleotide
caacgacggagacaagccca

SEQ ID NO: 635 - DNA, 20 bp, Artificial Sequence
  Description of Artificial Sequence: Synthetic oligonucleotide
ggacaccgagcggctcatcg

SEQ ID NO: 636 - DNA, 20 bp, Artificial Sequence
  Description of Artificial Sequence: Synthetic oligonucleotide
gcatagccgcctcttcgacc

SEQ ID NO: 637 - DNA, 20 bp, Artificial Sequence
  Description of Artificial Sequence: Synthetic oligonucleotide
gagtggtcgcagtggttagg

SEQ ID NO: 638 - DNA, 20 bp, Artificial Sequence
  Description of Artificial Sequence: Synthetic oligonucleotide
tgccggaggagtggtcgcag

SEQ ID NO: 639 - DNA, 20 bp, Artificial Sequence
  Description of Artificial Sequence: Synthetic oligonucleotide
cagccggcaactcagcagcg

SEQ ID NO: 640 - DNA, 20 bp, Artificial Sequence
  Description of Artificial Sequence: Synthetic oligonucleotide
cgggctgccccggctgccgg

SEQ ID NO: 641 - DNA, 20 bp, Artificial Sequence
  Description of Artificial Sequence: Synthetic oligonucleotide
tgggtaaaacctatcatcat

SEQ ID NO: 642 - DNA, 20 bp, Artificial Sequence
  Description of Artificial Sequence: Synthetic oligonucleotide
acccatccactcacaagccg

SEQ ID NO: 643 - DNA, 20 bp, Artificial Sequence
  Description of Artificial Sequence: Synthetic oligonucleotide
aatatcccccggcttgtgag

SEQ ID NO: 644 - DNA, 20 bp, Artificial Sequence
  Description of Artificial Sequence: Synthetic oligonucleotide
cccccggcttgtgagtggat

SEQ ID NO: 645 - DNA, 20 bp, Artificial Sequence
  Description of Artificial Sequence: Synthetic oligonucleotide
cccatccactcacaagccgg

SEQ ID NO: 646 - DNA, 20 bp, Artificial Sequence
  Description of Artificial Sequence: Synthetic oligonucleotide
gatgttccggatagttccat

SEQ ID NO: 647 - DNA, 20 bp, Artificial Sequence
  Description of Artificial Sequence: Synthetic oligonucleotide
ccaagcccatcaccattggc

SEQ ID NO: 648 - DNA, 20 bp, Artificial Sequence
  Description of Artificial Sequence: Synthetic oligonucleotide
gttcgctctccagcttggga

SEQ ID NO: 649 - DNA, 20 bp, Artificial Sequence
  Description of Artificial Sequence: Synthetic oligonucleotide
ttgggatggccggctacctg

SEQ ID NO: 650 - DNA, 20 bp, Artificial Sequence
  Description of Artificial Sequence: Synthetic oligonucleotide
aacatcccacgcctagtccc

SEQ ID NO: 651 - DNA, 20 bp, Artificial Sequence
  Description of Artificial Sequence: Synthetic oligonucleotide
cacacgctatggaaaactcc

SEQ ID NO: 652 - DNA, 20 bp, Artificial Sequence
  Description of Artificial Sequence: Synthetic oligonucleotide
atggcatatgtgtggggcaa

SEQ ID NO: 653 - DNA, 20 bp, Artificial Sequence
  Description of Artificial Sequence: Synthetic oligonucleotide
ctttgctctgccaaatccac

SEQ ID NO: 654 - DNA, 20 bp, Artificial Sequence
  Description of Artificial Sequence: Synthetic oligonucleotide
gcatcaccatggcatatgtg

SEQ ID NO: 655 - DNA, 20 bp, Artificial Sequence
  Description of Artificial Sequence: Synthetic oligonucleotide
catcaccatggcatatgtgt

SEQ ID NO: 656 - DNA, 20 bp, Artificial Sequence
  Description of Artificial Sequence: Synthetic oligonucleotide
tgggtgttgtccgcagccgc

SEQ ID NO: 657 - DNA, 20 bp, Artificial Sequence
  Description of Artificial Sequence: Synthetic oligonucleotide
agtgttatgtgggctttgga

SEQ ID NO: 658 - DNA, 20 bp, Artificial Sequence
  Description of Artificial Sequence: Synthetic oligonucleotide
atagtgatacacatctctcc

SEQ ID NO: 659 - DNA, 20 bp, Artificial Sequence
  Description of Artificial Sequence: Synthetic oligonucleotide
gaacaaaagatagtgttatg

SEQ ID NO: 660 - DNA, 20 bp, Artificial Sequence
  Description of Artificial Sequence: Synthetic oligonucleotide
aagcagcactacttacgtca

SEQ ID NO: 661 - DNA, 20 bp, Artificial Sequence
  Description of Artificial Sequence: Synthetic oligonucleotide
tacagcaatgtatagtgagt

SEQ ID NO: 662 - DNA, 20 bp, Artificial Sequence
  Description of Artificial Sequence: Synthetic oligonucleotide
tgtatagtgagttggtacaa

SEQ ID NO: 663 - DNA, 20 bp, Artificial Sequence
  Description of Artificial Sequence: Synthetic oligonucleotide
agtgagttggtacaatggag

SEQ ID NO: 664 - DNA, 20 bp, Artificial Sequence
  Description of Artificial Sequence: Synthetic oligonucleotide
catatgaaataccaaacacg

SEQ ID NO: 665 - DNA, 20 bp, Artificial Sequence
  Description of Artificial Sequence: Synthetic oligonucleotide
aaaccaacaatctcaaactc

SEQ ID NO: 666 - DNA, 20 bp, Artificial Sequence
  Description of Artificial Sequence: Synthetic oligonucleotide
ctctcgctctggccgacgag

SEQ ID NO: 667 - DNA, 20 bp, Artificial Sequence
  Description of Artificial Sequence: Synthetic oligonucleotide
cagcccatgtagtaagatgc

SEQ ID NO: 668 - DNA, 20 bp, Artificial Sequence
  Description of Artificial Sequence: Synthetic oligonucleotide
gttttggggcaggcgcagca

SEQ ID NO: 669 - DNA, 20 bp, Artificial Sequence
  Description of Artificial Sequence: Synthetic oligonucleotide
gtaaacggcgtactgagtcc

SEQ ID NO: 670 - DNA, 20 bp, Artificial Sequence
  Description of Artificial Sequence: Synthetic oligonucleotide
acacatcggcttctcctcca

SEQ ID NO: 671 - DNA, 20 bp, Artificial Sequence
  Description of Artificial Sequence: Synthetic oligonucleotide
ctgaactgcttgtaggcgag

SEQ ID NO: 672 - DNA, 20 bp, Artificial Sequence
  Description of Artificial Sequence: Synthetic oligonucleotide
gcagcttcacaccgggccac

SEQ ID NO: 673 - DNA, 20 bp, Artificial Sequence
  Description of Artificial Sequence: Synthetic oligonucleotide
ccgcaataagtatggactgc

SEQ ID NO: 674 - DNA, 20 bp, Artificial Sequence
  Description of Artificial Sequence: Synthetic oligonucleotide
tgtgaagctgcgggtgaccg

SEQ ID NO: 675 - DNA, 20 bp, Artificial Sequence
  Description of Artificial Sequence: Synthetic oligonucleotide
gtgaagctgcgggtgaccga

SEQ ID NO: 676 - DNA, 20 bp, Artificial Sequence
  Description of Artificial Sequence: Synthetic oligonucleotide
agtctttgcacatcattcgt

SEQ ID NO: 677 - DNA, 20 bp, Artificial Sequence
  Description of Artificial Sequence: Synthetic oligonucleotide
actgccaaggaggagatctc

SEQ ID NO: 678 - DNA, 20 bp, Artificial Sequence
  Description of Artificial Sequence: Synthetic oligonucleotide
atctcgggcagccaccacat

SEQ ID NO: 679 - DNA, 20 bp, Artificial Sequence
  Description of Artificial Sequence: Synthetic oligonucleotide
tgaaagagcgccttgggaca

SEQ ID NO: 680 - DNA, 20 bp, Artificial Sequence
  Description of Artificial Sequence: Synthetic oligonucleotide
gggcagccaccacattgggg

SEQ ID NO: 681 - DNA, 20 bp, Artificial Sequence
  Description of Artificial Sequence: Synthetic oligonucleotide
gatcactgaactgcacgctc

SEQ ID NO: 682 - DNA, 20 bp, Artificial Sequence
  Description of Artificial Sequence: Synthetic oligonucleotide
gcaggccgcgtcagttgttg

SEQ ID NO: 683 - DNA, 20 bp, Artificial Sequence
  Description of Artificial Sequence: Synthetic oligonucleotide
tcccatgtgtcgaagaagat

SEQ ID NO: 684 - DNA, 20 bp, Artificial Sequence
  Description of Artificial Sequence: Synthetic oligonucleotide
ctacagcaagggcttcaggc

SEQ ID NO: 685 - DNA, 20 bp, Artificial Sequence
  Description of Artificial Sequence: Synthetic oligonucleotide
gtgcagttcagtgatcgtac

SEQ ID NO: 686 - DNA, 20 bp, Artificial Sequence
  Description of Artificial Sequence: Synthetic oligonucleotide
ctcacgttcatcatggtgcc

SEQ ID NO: 687 - DNA, 20 bp, Artificial Sequence
  Description of Artificial Sequence: Synthetic oligonucleotide
tcactctatatgctctgtac

SEQ ID NO: 688 - DNA, 20 bp, Artificial Sequence
  Description of Artificial Sequence: Synthetic oligonucleotide
gggactgctcacgttcatca

SEQ ID NO: 689 - DNA, 20 bp, Artificial Sequence
  Description of Artificial Sequence: Synthetic oligonucleotide
atggctttgaatgtggcgtg

SEQ ID NO: 690 - DNA, 20 bp, Artificial Sequence
  Description of Artificial Sequence: Synthetic oligonucleotide
gcaaagtccaatgcagccag

SEQ ID NO: 691 - DNA, 20 bp, Artificial Sequence
  Description of Artificial Sequence: Synthetic oligonucleotide
cggccaggcatggacttggc

SEQ ID NO: 692 - DNA, 20 bp, Artificial Sequence
  Description of Artificial Sequence: Synthetic oligonucleotide
ggcccaggatgcttgactca

SEQ ID NO: 693 - DNA, 20 bp, Artificial Sequence
  Description of Artificial Sequence: Synthetic oligonucleotide
cccatcttggctccagacac

SEQ ID NO: 694 - DNA, 20 bp, Artificial Sequence
  Description of Artificial Sequence: Synthetic oligonucleotide
actcacggggagcagctcac

SEQ ID NO: 695 - DNA, 20 bp, Artificial Sequence
  Description of Artificial Sequence: Synthetic oligonucleotide
ctgtgtctggagccaagatg

SEQ ID NO: 696 - DNA, 20 bp, Artificial Sequence
  Description of Artificial Sequence: Synthetic oligonucleotide
ttgttcagctccaggaccca

SEQ ID NO: 697 - DNA, 20 bp, Artificial Sequence
  Description of Artificial Sequence: Synthetic oligonucleotide
aaacactgaacctctgggag

SEQ ID NO: 698 - DNA, 20 bp, Artificial Sequence
  Description of Artificial Sequence: Synthetic oligonucleotide
cctgtctcctgggttcccgt

SEQ ID NO: 699 - DNA, 20 bp, Artificial Sequence
  Description of Artificial Sequence: Synthetic oligonucleotide
aaaacactgaacctctggga

SEQ ID NO: 700 - DNA, 20 bp, Artificial Sequence
  Description of Artificial Sequence: Synthetic oligonucleotide
tttcttcagagaatagatag

SEQ ID NO: 701 - DNA, 20 bp, Artificial Sequence
  Description of Artificial Sequence: Synthetic oligonucleotide
gttcatagctgggctcctgg

SEQ ID NO: 702 - DNA, 20 bp, Artificial Sequence
  Description of Artificial Sequence: Synthetic oligonucleotide
tggagaaggagttcatagct

SEQ ID NO: 703 - DNA, 20 bp, Artificial Sequence
  Description of Artificial Sequence: Synthetic oligonucleotide
ggaaggcagcaggcaacacc

SEQ ID NO: 704 - DNA, 20 bp, Artificial Sequence
  Description of Artificial Sequence: Synthetic oligonucleotide
tttgtcaattcgttctgaag

SEQ ID NO: 705 - DNA, 20 bp, Artificial Sequence
  Description of Artificial Sequence: Synthetic oligonucleotide
cttccaatctggattcaatg

SEQ ID NO: 706 - DNA, 20 bp, Artificial Sequence
  Description of Artificial Sequence: Synthetic oligonucleotide
cagcaatgttgtttgtgagt

SEQ ID NO: 707 - DNA, 20 bp, Artificial Sequence
  Description of Artificial Sequence: Synthetic oligonucleotide
gcacggctcctggaagtctt

SEQ ID NO: 708 - DNA, 20 bp, Artificial Sequence
  Description of Artificial Sequence: Synthetic oligonucleotide
agcctttgtcgtcagggatg

SEQ ID NO: 709 - DNA, 20 bp, Artificial Sequence
  Description of Artificial Sequence: Synthetic oligonucleotide
agcaatgttgtttgtgagtg

SEQ ID NO: 710 - DNA, 20 bp, Artificial Sequence
  Description of Artificial Sequence: Synthetic oligonucleotide
ttgtttgtgagtggggtcct

SEQ ID NO: 711 - DNA, 20 bp, Artificial Sequence
  Description of Artificial Sequence: Synthetic oligonucleotide
ggggccccccgcggtgacca

SEQ ID NO: 712 - DNA, 20 bp, Artificial Sequence
  Description of Artificial Sequence: Synthetic oligonucleotide
ggggcagccgcctgactcca

SEQ ID NO: 713 - DNA, 20 bp, Artificial Sequence
  Description of Artificial Sequence: Synthetic oligonucleotide
gtgcagcaccatagctcacc

SEQ ID NO: 714 - DNA, 20 bp, Artificial Sequence
  Description of Artificial Sequence: Synthetic oligonucleotide
tagcagggccaggtgagcta

SEQ ID NO: 715 - DNA, 20 bp, Artificial Sequence
  Description of Artificial Sequence: Synthetic oligonucleotide
cctgtgtgtgaagcccccca

SEQ ID NO: 716 - DNA, 20 bp, Artificial Sequence
  Description of Artificial Sequence: Synthetic oligonucleotide
ttcccccaccccaggatccg

SEQ ID NO: 717 - DNA, 20 bp, Artificial Sequence
  Description of Artificial Sequence: Synthetic oligonucleotide
ttggctgagaggatttctgt

SEQ ID NO: 718 - DNA, 20 bp, Artificial Sequence
  Description of Artificial Sequence: Synthetic oligonucleotide
agtcggggagaacgggtatg

SEQ ID NO: 719 - DNA, 20 bp, Artificial Sequence
  Description of Artificial Sequence: Synthetic oligonucleotide
agatagaggatgacattgga

SEQ ID NO: 720 - DNA, 20 bp, Artificial Sequence
  Description of Artificial Sequence: Synthetic oligonucleotide
gtgaggagttcccccacccc

SEQ ID NO: 721 - DNA, 20 bp, Artificial Sequence
  Description of Artificial Sequence: Synthetic oligonucleotide
cggcgtgcgtgatgttgggc

SEQ ID NO: 722 - DNA, 20 bp, Artificial Sequence
  Description of Artificial Sequence: Synthetic oligonucleotide
tcgtcgccagcggcgcacca

SEQ ID NO: 723 - DNA, 20 bp, Artificial Sequence
  Description of Artificial Sequence: Synthetic oligonucleotide
cgtcgtgcggcggcttccgg

SEQ ID NO: 724 - DNA, 20 bp, Artificial Sequence
  Description of Artificial Sequence: Synthetic oligonucleotide
gacacctgtacgtcgtgcgg

SEQ ID NO: 725 - DNA, 20 bp, Artificial Sequence
  Description of Artificial Sequence: Synthetic oligonucleotide
caggacacctgtacgtcgtg

SEQ ID NO: 726 - DNA, 20 bp, Artificial Sequence
  Description of Artificial Sequence: Synthetic oligonucleotide
ctcaaagcagctctggacac

SEQ ID NO: 727 - DNA, 20 bp, Artificial Sequence
  Description of Artificial Sequence: Synthetic oligonucleotide
ccgctggctctccagttcca

SEQ ID NO: 728 - DNA, 20 bp, Artificial Sequence
  Description of Artificial Sequence: Synthetic oligonucleotide
ggtcagtgtccagcatgtgg

SEQ ID NO: 729 - DNA, 20 bp, Artificial Sequence
  Description of Artificial Sequence: Synthetic oligonucleotide
tggctctccagttccaaggt

SEQ ID NO: 730 - DNA, 20 bp, Artificial Sequence
  Description of Artificial Sequence: Synthetic oligonucleotide
gtcagtgtccagcatgtggg

SEQ ID NO: 731 - DNA, 20 bp, Artificial Sequence
  Description of Artificial Sequence: Synthetic oligonucleotide
ttattctgggacgactggtc

SEQ ID NO: 732 - DNA, 20 bp, Artificial Sequence
  Description of Artificial Sequence: Synthetic oligonucleotide
tggtgcgagcacaggggaca

SEQ ID NO: 733 - DNA, 20 bp, Artificial Sequence
  Description of Artificial Sequence: Synthetic oligonucleotide
gccctccggagactacagcc

SEQ ID NO: 734 - DNA, 20 bp, Artificial Sequence
  Description of Artificial Sequence: Synthetic oligonucleotide
atgagttattctgggacgac

SEQ ID NO: 735 - DNA, 20 bp, Artificial Sequence
  Description of Artificial Sequence: Synthetic oligonucleotide
ggccattcaccaggagcatg

SEQ ID NO: 736 - DNA, 20 bp, Artificial Sequence
  Description of Artificial Sequence: Synthetic oligonucleotide
gaagcggactttaaagttcg

SEQ ID NO: 737 - DNA, 20 bp, Artificial Sequence
  Description of Artificial Sequence: Synthetic oligonucleotide
ctaccaaaccaatgatcctc

SEQ ID NO: 738 - DNA, 20 bp, Artificial Sequence
  Description of Artificial Sequence: Synthetic oligonucleotide
gacgatcttcaaagtatgcc

SEQ ID NO: 739 - DNA, 20 bp, Artificial Sequence
  Description of Artificial Sequence: Synthetic oligonucleotide
tggacagttctgagattcac

SEQ ID NO: 740 - DNA, 20 bp, Artificial Sequence
  Description of Artificial Sequence: Synthetic oligonucleotide
atcttcaaagtatgccaggc

SEQ ID NO: 741 - DNA, 20 bp, Artificial Sequence
  Description of Artificial Sequence: Synthetic oligonucleotide
gtccatcctgctcggtcttg

SEQ ID NO: 742 - DNA, 20 bp, Artificial Sequence
  Description of Artificial Sequence: Synthetic oligonucleotide
tggggtctcgaataggagcc

SEQ ID NO: 743 - DNA, 20 bp, Artificial Sequence
  Description of Artificial Sequence: Synthetic oligonucleotide
cagctggctcatggggtaga

SEQ ID NO: 744 - DNA, 20 bp, Artificial Sequence
  Description of Artificial Sequence: Synthetic oligonucleotide
tcgaaactcagctggctcat

SEQ ID NO: 745 - DNA, 20 bp, Artificial Sequence
  Description of Artificial Sequence: Synthetic oligonucleotide
gatattgagaacgagtgtct

SEQ ID NO: 746 - DNA, 20 bp, Artificial Sequence
  Description of Artificial Sequence: Synthetic oligonucleotide
tgtatattttcaagcacggc

SEQ ID NO: 747 - DNA, 20 bp, Artificial Sequence
  Description of Artificial Sequence: Synthetic oligonucleotide
tcttttgaattgttaccaga

SEQ ID NO: 748 - DNA, 20 bp, Artificial Sequence
  Description of Artificial Sequence: Synthetic oligonucleotide
gttctgaaaaagactctgca

SEQ ID NO: 749 - DNA, 20 bp, Artificial Sequence
  Description of Artificial Sequence: Synthetic oligonucleotide
aagaaagcaggtaatcagac

SEQ ID NO: 750 - DNA, 20 bp, Artificial Sequence
  Description of Artificial Sequence: Synthetic oligonucleotide
tgtacttcgatgcagtccta

SEQ ID NO: 751 - DNA, 20 bp, Artificial Sequence
  Description of Artificial Sequence: Synthetic oligonucleotide
cggcggcatcgcctggaccc

SEQ ID NO: 752 - DNA, 20 bp, Artificial Sequence
  Description of Artificial Sequence: Synthetic oligonucleotide
cagcccacccacatcatcct

SEQ ID NO: 753 - DNA, 20 bp, Artificial Sequence
  Description of Artificial Sequence: Synthetic oligonucleotide
catgtgctgctgcccgctcg

SEQ ID NO: 754 - DNA, 20 bp, Artificial Sequence
  Description of Artificial Sequence: Synthetic oligonucleotide
ggcggcatcgcctggaccca

SEQ ID NO: 755 - DNA, 20 bp, Artificial Sequence
  Description of Artificial Sequence: Synthetic oligonucleotide
gcaaagagggagtggtacac

SEQ ID NO: 756 - DNA, 20 bp, Artificial Sequence
  Description of Artificial Sequence: Synthetic oligonucleotide
tgtccgttggcttcataaag

SEQ ID NO: 757 - DNA, 20 bp, Artificial Sequence
  Description of Artificial Sequence: Synthetic oligonucleotide
gctgggcccgacaggcccgc

SEQ ID NO: 758 - DNA, 20 bp, Artificial Sequence
  Description of Artificial Sequence: Synthetic oligonucleotide
gcggttccgccaggcccccg

SEQ ID NO: 759 - DNA, 20 bp, Artificial Sequence
  Description of Artificial Sequence: Synthetic oligonucleotide
cggaaccgccggggtccgca

SEQ ID NO: 760 - DNA, 20 bp, Artificial Sequence
  Description of Artificial Sequence: Synthetic oligonucleotide
ctgcttcttgagaagtcatc

SEQ ID NO: 761 - DNA, 20 bp, Artificial Sequence
  Description of Artificial Sequence: Synthetic oligonucleotide
atgtctgccttgctcaagac

SEQ ID NO: 762 - DNA, 20 bp, Artificial Sequence
  Description of Artificial Sequence: Synthetic oligonucleotide
gtatccaagttcttgcaaac

SEQ ID NO: 763 - DNA, 20 bp, Artificial Sequence
  Description of Artificial Sequence: Synthetic oligonucleotide
ctgcacaggtgtacaatcct

SEQ ID NO: 764 - DNA, 20 bp, Artificial Sequence
  Description of Artificial Sequence: Synthetic oligonucleotide
accattttatttctgggggt

SEQ ID NO: 765 - DNA, 20 bp, Artificial Sequence
  Description of Artificial Sequence: Synthetic oligonucleotide
tacttgtcgtctgattctcc

SEQ ID NO: 766 - DNA, 20 bp, Artificial Sequence
  Description of Artificial Sequence: Synthetic oligonucleotide
tcctgcatctctcaatcttg

SEQ ID NO: 767 - DNA, 20 bp, Artificial Sequence
  Description of Artificial Sequence: Synthetic oligonucleotide
acgtggaattataccagcca

SEQ ID NO: 768 - DNA, 20 bp, Artificial Sequence
  Description of Artificial Sequence: Synthetic oligonucleotide
tagtgtacgaactggaggat

SEQ ID NO: 769 - DNA, 20 bp, Artificial Sequence
  Description of Artificial Sequence: Synthetic oligonucleotide
aatccctgttgactttggga

SEQ ID NO: 770 - DNA, 20 bp, Artificial Sequence
  Description of Artificial Sequence: Synthetic oligonucleotide
tgaagagtatacctgggaag

SEQ ID NO: 771 - DNA, 20 bp, Artificial Sequence
  Description of Artificial Sequence: Synthetic oligonucleotide
accaatctattgtgggctct

SEQ ID NO: 772 - DNA, 20 bp, Artificial Sequence
  Description of Artificial Sequence: Synthetic oligonucleotide
ctcatcgcggtagctgcgat

SEQ ID NO: 773 - DNA, 20 bp, Artificial Sequence
  Description of Artificial Sequence: Synthetic oligonucleotide
tgacttcaattatgaacgtc

SEQ ID NO: 774 - DNA, 20 bp, Artificial Sequence
  Description of Artificial Sequence: Synthetic oligonucleotide
ctactgcttcgcgtccagac

SEQ ID NO: 775 - DNA, 20 bp, Artificial Sequence
  Description of Artificial Sequence: Synthetic oligonucleotide
cagaacgcagagaaaatccc

SEQ ID NO: 776 - DNA, 20 bp, Artificial Sequence
  Description of Artificial Sequence: Synthetic oligonucleotide
agggaccagtacatgaggac

SEQ ID NO: 777 - DNA, 20 bp, Artificial Sequence
  Description of Artificial Sequence: Synthetic oligonucleotide
tctcgacacagcaggtcaag

SEQ ID NO: 778 - DNA, 20 bp, Artificial Sequence
  Description of Artificial Sequence: Synthetic oligonucleotide
caatgagggaccagtacatg

SEQ ID NO: 779 - DNA, 20 bp, Artificial Sequence
  Description of Artificial Sequence: Synthetic oligonucleotide
ggaccagtacatgaggactg

SEQ ID NO: 780 - DNA, 20 bp, Artificial Sequence
  Description of Artificial Sequence: Synthetic oligonucleotide
ggactctgaagatgtaccta

SEQ ID NO: 781 - DNA, 20 bp, Artificial Sequence
  Description of Artificial Sequence: Synthetic oligonucleotide
cctccacagacgagagctcc

SEQ ID NO: 782 - DNA, 20 bp, Artificial Sequence
  Description of Artificial Sequence: Synthetic oligonucleotide
acgactactcgccccgcagc

SEQ ID NO: 783 - DNA, 20 bp, Artificial Sequence
  Description of Artificial Sequence: Synthetic oligonucleotide
gcaagaacatcttgtcggct

SEQ ID NO: 784 - DNA, 20 bp, Artificial Sequence
  Description of Artificial Sequence: Synthetic oligonucleotide
ctggaccacctctgaaggca

SEQ ID NO: 785 - DNA, 20 bp, Artificial Sequence
  Description of Artificial Sequence: Synthetic oligonucleotide
gaacaggaaaactggcatga

SEQ ID NO: 786 - DNA, 20 bp, Artificial Sequence
  Description of Artificial Sequence: Synthetic oligonucleotide
ttgccatccagtgggactat

SEQ ID NO: 787 - DNA, 20 bp, Artificial Sequence
  Description of Artificial Sequence: Synthetic oligonucleotide
tccctgaccacgggccagga

SEQ ID NO: 788 - DNA, 20 bp, Artificial Sequence
  Description of Artificial Sequence: Synthetic oligonucleotide
tgtggccaaagcgaacagcc

SEQ ID NO: 789 - DNA, 20 bp, Artificial Sequence
  Description of Artificial Sequence: Synthetic oligonucleotide
cgggagagcgagagcaccgc

SEQ ID NO: 790 - DNA, 20 bp, Artificial Sequence
  Description of Artificial Sequence: Synthetic oligonucleotide
aaggcgcagtccctgaccac

SEQ ID NO: 791 - DNA, 20 bp, Artificial Sequence
  Description of Artificial Sequence: Synthetic oligonucleotide
cgcggcgaggagcaaggcga

SEQ ID NO: 792 - DNA, 20 bp, Artificial Sequence
  Description of Artificial Sequence: Synthetic oligonucleotide
ccccgccgcggcgaggagca

SEQ ID NO: 793 - DNA, 20 bp, Artificial Sequence
  Description of Artificial Sequence: Synthetic oligonucleotide
aggggtctttacgtgttcca

SEQ ID NO: 794 - DNA, 20 bp, Artificial Sequence
  Description of Artificial Sequence: Synthetic oligonucleotide
cctggggctggaaattgcgc

SEQ ID NO: 795 - DNA, 20 bp, Artificial Sequence
  Description of Artificial Sequence: Synthetic oligonucleotide
gcgggaccacaggtgagcac

SEQ ID NO: 796 - DNA, 20 bp, Artificial Sequence
  Description of Artificial Sequence: Synthetic oligonucleotide
gctgccacgagcgctgcgcg

SEQ ID NO: 797 - DNA, 20 bp, Artificial Sequence
  Description of Artificial Sequence: Synthetic oligonucleotide
agctttcagaggacttaatg

SEQ ID NO: 798 - DNA, 20 bp, Artificial Sequence
  Description of Artificial Sequence: Synthetic oligonucleotide
ggaagatttataaatgctcc

SEQ ID NO: 799 - DNA, 20 bp, Artificial Sequence
  Description of Artificial Sequence: Synthetic oligonucleotide
agtcgagtgagaccggccgt

SEQ ID NO: 800 - DNA, 20 bp, Artificial Sequence
  Description of Artificial Sequence: Synthetic oligonucleotide
gatcactttgacagggaggt

SEQ ID NO: 801 - DNA, 20 bp, Artificial Sequence
  Description of Artificial Sequence: Synthetic oligonucleotide
tctcatagtactggtgcgac

SEQ ID NO: 802 - DNA, 20 bp, Artificial Sequence
  Description of Artificial Sequence: Synthetic oligonucleotide
cgcttgccatgagatgaggc

SEQ ID NO: 803 - DNA, 20 bp, Artificial Sequence
  Description of Artificial Sequence: Synthetic oligonucleotide
tgacgggggtcaccacagtc

SEQ ID NO: 804 - DNA, 20 bp, Artificial Sequence
  Description of Artificial Sequence: Synthetic oligonucleotide
gcccatccgaaatgtgcccc

SEQ ID NO: 805 - DNA, 20 bp, Artificial Sequence
  Description of Artificial Sequence: Synthetic oligonucleotide
gatccggtctccgacgtgga

SEQ ID NO: 806 - DNA, 20 bp, Artificial Sequence
  Description of Artificial Sequence: Synthetic oligonucleotide
taaccaggaaggacgcagaa

SEQ ID NO: 807 - DNA, 20 bp, Artificial Sequence
  Description of Artificial Sequence: Synthetic oligonucleotide
ctttgctgtttattggacgt

SEQ ID NO: 808 - DNA, 20 bp, Artificial Sequence
  Description of Artificial Sequence: Synthetic oligonucleotide
tttcaaggatataaccagga

SEQ ID NO: 809 - DNA, 20 bp, Artificial Sequence
  Description of Artificial Sequence: Synthetic oligonucleotide
aaagacagcttgagtgacga

SEQ ID NO: 810 - DNA, 20 bp, Artificial Sequence
  Description of Artificial Sequence: Synthetic oligonucleotide
caacgtccaataaacagcaa

SEQ ID NO: 811 - DNA, 20 bp, Artificial Sequence
  Description of Artificial Sequence: Synthetic oligonucleotide
ctctagcagttacagcgact

SEQ ID NO: 812 - DNA, 20 bp, Artificial Sequence
  Description of Artificial Sequence: Synthetic oligonucleotide
tccactggggactgatgaaa

SEQ ID NO: 813 - DNA, 20 bp, Artificial Sequence
  Description of Artificial Sequence: Synthetic oligonucleotide
ctcccgtactgaagctacgc

SEQ ID NO: 814 - DNA, 20 bp, Artificial Sequence
  Description of Artificial Sequence: Synthetic oligonucleotide
agaaatggggcatctgatgc

SEQ ID NO: 815 - DNA, 20 bp, Artificial Sequence
  Description of Artificial Sequence: Synthetic oligonucleotide
tgaggcaggtcgtggcagat

SEQ ID NO: 816 - DNA, 20 bp, Artificial Sequence
  Description of Artificial Sequence: Synthetic oligonucleotide
aaagttaaatccaagggcta

SEQ ID NO: 817 - DNA, 20 bp, Artificial Sequence
  Description of Artificial Sequence: Synthetic oligonucleotide
aattagtgactttggacaga

SEQ ID NO: 818 - DNA, 20 bp, Artificial Sequence
  Description of Artificial Sequence: Synthetic oligonucleotide
tatttccactgacaatttga

SEQ ID NO: 819 - DNA, 20 bp, Artificial Sequence
  Description of Artificial Sequence: Synthetic oligonucleotide
actttggacagatggcttca

SEQ ID NO: 820 - DNA, 20 bp, Artificial Sequence
  Description of Artificial Sequence: Synthetic oligonucleotide
tgtctctggctgagaaacta

SEQ ID NO: 821 - DNA, 20 bp, Artificial Sequence
  Description of Artificial Sequence: Synthetic oligonucleotide
cgttaactgcagagccgtcg

SEQ ID NO: 822 - DNA, 20 bp, Artificial Sequence
  Description of Artificial Sequence: Synthetic oligonucleotide
gacgcccatccagctgaacc

SEQ ID NO: 823 - DNA, 20 bp, Artificial Sequence
  Description of Artificial Sequence: Synthetic oligonucleotide
gttaactgcagagccgtcgg

SEQ ID NO: 824 - DNA, 20 bp, Artificial Sequence
  Description of Artificial Sequence: Synthetic oligonucleotide
cagccgcatctccttccacc

SEQ ID NO: 825 - DNA, 20 bp, Artificial Sequence
  Description of Artificial Sequence: Synthetic oligonucleotide
tggagatcaaacccgcaatc

SEQ ID NO: 826 - DNA, 20 bp, Artificial Sequence
  Description of Artificial Sequence: Synthetic oligonucleotide
gggccagcatcggggctccg

SEQ ID NO: 827 - DNA, 20 bp, Artificial Sequence
  Description of Artificial Sequence: Synthetic oligonucleotide
cagcatttgcatggaacaca

SEQ ID NO: 828 - DNA, 20 bp, Artificial Sequence
  Description of Artificial Sequence: Synthetic oligonucleotide
cgagcagcagaagaagcggc

SEQ ID NO: 829 - DNA, 20 bp, Artificial Sequence
  Description of Artificial Sequence: Synthetic oligonucleotide
cggggagatcagcatttgca

SEQ ID NO: 830 - DNA, 20 bp, Artificial Sequence
  Description of Artificial Sequence: Synthetic oligonucleotide
cttcctccgggccagcatcg

SEQ ID NO: 831 - DNA, 20 bp, Artificial Sequence
  Description of Artificial Sequence: Synthetic oligonucleotide
tgtgaagataagccactcct

SEQ ID NO: 832 - DNA, 20 bp, Artificial Sequence
  Description of Artificial Sequence: Synthetic oligonucleotide
cgagtcatcaggctctcaat

SEQ ID NO: 833 - DNA, 20 bp, Artificial Sequence
  Description of Artificial Sequence: Synthetic oligonucleotide
tttacagtgttcccaaggag

SEQ ID NO: 834 - DNA, 20 bp, Artificial Sequence
  Description of Artificial Sequence: Synthetic oligonucleotide
gtgaagataagccactcctt

SEQ ID NO: 835 - DNA, 20 bp, Artificial Sequence
  Description of Artificial Sequence: Synthetic oligonucleotide
tccattgaagggcgctggga

SEQ ID NO: 836 - DNA, 20 bp, Artificial Sequence
  Description of Artificial Sequence: Synthetic oligonucleotide
tcctcggggcgcctttggaa

SEQ ID NO: 837 - DNA, 20 bp, Artificial Sequence
  Description of Artificial Sequence: Synthetic oligonucleotide
ttcctgtaagtcagcttcca

SEQ ID NO: 838 - DNA, 20 bp, Artificial Sequence
  Description of Artificial Sequence: Synthetic oligonucleotide
atgacaaccatggtacctct

SEQ ID NO: 839 - DNA, 20 bp, Artificial Sequence
  Description of Artificial Sequence: Synthetic oligonucleotide
ccgatgttctcctgatcccc

SEQ ID NO: 840 - DNA, 20 bp, Artificial Sequence
  Description of Artificial Sequence: Synthetic oligonucleotide
gtaatggagtacatgagcac

SEQ ID NO: 841 - DNA, 20 bp, Artificial Sequence
  Description of Artificial Sequence: Synthetic oligonucleotide
cgggcccggagatggtccgc

SEQ ID NO: 842 - DNA, 20 bp, Artificial Sequence
  Description of Artificial Sequence: Synthetic oligonucleotide
gcgggcccggagatggtccg

SEQ ID NO: 843 - DNA, 20 bp, Artificial Sequence
  Description of Artificial Sequence: Synthetic oligonucleotide
ccgcgggcaggtgttcgacg

SEQ ID NO: 844 - DNA, 20 bp, Artificial Sequence
  Description of Artificial Sequence: Synthetic oligonucleotide
ttctctaccagatcctcaga

SEQ ID NO: 845 - DNA, 20 bp, Artificial Sequence
  Description of Artificial Sequence: Synthetic oligonucleotide
gtgtggccacatattctgtc

SEQ ID NO: 846 - DNA, 20 bp, Artificial Sequence
  Description of Artificial Sequence: Synthetic oligonucleotide
gacatgtcgggccctcgcgc

SEQ ID NO: 847 - DNA, 20 bp, Artificial Sequence
  Description of Artificial Sequence: Synthetic oligonucleotide
gccggtagaagccggcgcga

SEQ ID NO: 848 - DNA, 20 bp, Artificial Sequence
  Description of Artificial Sequence: Synthetic oligonucleotide
actcggccgggatcatccac

SEQ ID NO: 849 - DNA, 20 bp, Artificial Sequence
  Description of Artificial Sequence: Synthetic oligonucleotide
cggtcttgttcagctcctgc

SEQ ID NO: 850 - DNA, 20 bp, Artificial Sequence
  Description of Artificial Sequence: Synthetic oligonucleotide
ctcggccgggatcatccacc

SEQ ID NO: 851 - DNA, 20 bp, Artificial Sequence
  Description of Artificial Sequence: Synthetic oligonucleotide
gcatgaatgatggactgaaa

SEQ ID NO: 852 - DNA, 20 bp, Artificial Sequence
  Description of Artificial Sequence: Synthetic oligonucleotide
aagtaaccgcagttctctgt

SEQ ID NO: 853 - DNA, 20 bp, Artificial Sequence
  Description of Artificial Sequence: Synthetic oligonucleotide
attcagctgacataattcac

SEQ ID NO: 854 - DNA, 20 bp, Artificial Sequence
  Description of Artificial Sequence: Synthetic oligonucleotide
tacacctgcaaggtctctgg

SEQ ID NO: 855 - DNA, 20 bp, Artificial Sequence
  Description of Artificial Sequence: Synthetic oligonucleotide
taccagaacctgtctccagt

SEQ ID NO: 856 - DNA, 20 bp, Artificial Sequence
  Description of Artificial Sequence: Synthetic oligonucleotide
tttgtgatttcggcctggcc

SEQ ID NO: 857 - DNA, 20 bp, Artificial Sequence
  Description of Artificial Sequence: Synthetic oligonucleotide
ggggagccccgtagaaccga

SEQ ID NO: 858 - DNA, 20 bp, Artificial Sequence
  Description of Artificial Sequence: Synthetic oligonucleotide
cacatactccgtcaggaagc

SEQ ID NO: 859 - DNA, 20 bp, Artificial Sequence
  Description of Artificial Sequence: Synthetic oligonucleotide
gcgtagccacatactccgtc

SEQ ID NO: 860 - DNA, 20 bp, Artificial Sequence
  Description of Artificial Sequence: Synthetic oligonucleotide
ccacgcgagtcttgcgcacg

SEQ ID NO: 861 - DNA, 20 bp, Artificial Sequence
  Description of Artificial Sequence: Synthetic oligonucleotide
tagtagcgagtcactacata

SEQ ID NO: 862 - DNA, 20 bp, Artificial Sequence
  Description of Artificial Sequence: Synthetic oligonucleotide
gaatcagactcatgccaagc

SEQ ID NO: 863 - DNA, 20 bp, Artificial Sequence
  Description of Artificial Sequence: Synthetic oligonucleotide
actttgaagattcttgactt

SEQ ID NO: 864 - DNA, 20 bp, Artificial Sequence
  Description of Artificial Sequence: Synthetic oligonucleotide
gcccatgccaaggatgacct

SEQ ID NO: 865 - DNA, 20 bp, Artificial Sequence
  Description of Artificial Sequence: Synthetic oligonucleotide
gagtctgattctgaaatggt

SEQ ID NO: 866 - DNA, 20 bp, Artificial Sequence
  Description of Artificial Sequence: Synthetic oligonucleotide
tcagttttatagtgtgcaag

SEQ ID NO: 867 - DNA, 20 bp, Artificial Sequence
  Description of Artificial Sequence: Synthetic oligonucleotide
aagcatctggtaaagaaggt

SEQ ID NO: 868 - DNA, 20 bp, Artificial Sequence
  Description of Artificial Sequence: Synthetic oligonucleotide
gtaacgttttaggacagtga

SEQ ID NO: 869 - DNA, 20 bp, Artificial Sequence
  Description of Artificial Sequence: Synthetic oligonucleotide
gctgaaaccaattggctctg

SEQ ID NO: 870 - DNA, 20 bp, Artificial Sequence
  Description of Artificial Sequence: Synthetic oligonucleotide
gtcacccatacatcactgtt

SEQ ID NO: 871 - DNA, 20 bp, Artificial Sequence
  Description of Artificial Sequence: Synthetic oligonucleotide
ctggagaccttacgacgggt

SEQ ID NO: 872 - DNA, 20 bp, Artificial Sequence
  Description of Artificial Sequence: Synthetic oligonucleotide
ccaccctcacgccagactcc

SEQ ID NO: 873 - DNA, 20 bp, Artificial Sequence
  Description of Artificial Sequence: Synthetic oligonucleotide
gggacctcggcgccaatggg

SEQ ID NO: 874 - DNA, 20 bp, Artificial Sequence
  Description of Artificial Sequence: Synthetic oligonucleotide
accttacgacgggttgggga

SEQ ID NO: 875 - DNA, 20 bp, Artificial Sequence
  Description of Artificial Sequence: Synthetic oligonucleotide
gccatccccaacccgtcgta

SEQ ID NO: 876 - DNA, 20 bp, Artificial Sequence
  Description of Artificial Sequence: Synthetic oligonucleotide
ttgaagttattaaagtctgt

SEQ ID NO: 877 - DNA, 20 bp, Artificial Sequence
  Description of Artificial Sequence: Synthetic oligonucleotide
agacacttatactatgaaag

SEQ ID NO: 878 - DNA, 20 bp, Artificial Sequence
  Description of Artificial Sequence: Synthetic oligonucleotide
taccatgatctacaggaact

SEQ ID NO: 879 - DNA, 20 bp, Artificial Sequence
  Description of Artificial Sequence: Synthetic oligonucleotide
atcagtaggtacagacatgt

SEQ ID NO: 880 - DNA, 20 bp, Artificial Sequence
  Description of Artificial Sequence: Synthetic oligonucleotide
gcttctctgtgaaagagcac

SEQ ID NO: 881 - DNA, 20 bp, Artificial Sequence
  Description of Artificial Sequence: Synthetic oligonucleotide
tcctgtttaccttggtgcag

SEQ ID NO: 882 - DNA, 20 bp, Artificial Sequence
  Description of Artificial Sequence: Synthetic oligonucleotide
ttacttcttgacggtccaaa

SEQ ID NO: 883 - DNA, 20 bp, Artificial Sequence
  Description of Artificial Sequence: Synthetic oligonucleotide
caaggctgaccatatgtggc

SEQ ID NO: 884 - DNA, 20 bp, Artificial Sequence
  Description of Artificial Sequence: Synthetic oligonucleotide
aagaaaactagagttctcct

SEQ ID NO: 885 - DNA, 20 bp, Artificial Sequence
  Description of Artificial Sequence: Synthetic oligonucleotide
ctacaaagaagttgatgaac

SEQ ID NO: 886 - DNA, 20 bp, Artificial Sequence
  Description of Artificial Sequence: Synthetic oligonucleotide
tgcgcaccgcgaggacctgc

SEQ ID NO: 887 - DNA, 20 bp, Artificial Sequence
  Description of Artificial Sequence: Synthetic oligonucleotide
ctttgcgtcccgacgcccgc

SEQ ID NO: 888 - DNA, 20 bp, Artificial Sequence
  Description of Artificial Sequence: Synthetic oligonucleotide
gaaataaagctcctgggcaa

SEQ ID NO: 889 - DNA, 20 bp, Artificial Sequence
  Description of Artificial Sequence: Synthetic oligonucleotide
gtgcgcaccgcgaggacctg

SEQ ID NO: 890 - DNA, 20 bp, Artificial Sequence
  Description of Artificial Sequence: Synthetic oligonucleotide
gcaaagcgttctaggggcgc

SEQ ID NO: 891 - DNA, 20 bp, Artificial Sequence
  Description of Artificial Sequence: Synthetic oligonucleotide
ttttcttaataactcgaggc

SEQ ID NO: 892 - DNA, 20 bp, Artificial Sequence
  Description of Artificial Sequence: Synthetic oligonucleotide
ttcatgaaaataagccctca

SEQ ID NO: 893 - DNA, 20 bp, Artificial Sequence
  Description of Artificial Sequence: Synthetic oligonucleotide
ctgttttatatctcacaacc

SEQ ID NO: 894 - DNA, 20 bp, Artificial Sequence
  Description of Artificial Sequence: Synthetic oligonucleotide
ggcaatcatgacgatcccac

SEQ ID NO: 895 - DNA, 20 bp, Artificial Sequence
  Description of Artificial Sequence: Synthetic oligonucleotide
ctttggacgttcaatgtctg

SEQ ID NO: 896 - DNA, 20 bp, Artificial Sequence
  Description of Artificial Sequence: Synthetic oligonucleotide
gtccaaaaccactcttcagg

SEQ ID NO: 897 - DNA, 20 bp, Artificial Sequence
  Description of Artificial Sequence: Synthetic oligonucleotide
tgtaacagtattgggtagat

SEQ ID NO: 898 - DNA, 20 bp, Artificial Sequence
  Description of Artificial Sequence: Synthetic oligonucleotide
cggatcactcctggcagcaa

SEQ ID NO: 899 - DNA, 20 bp, Artificial Sequence
  Description of Artificial Sequence: Synthetic oligonucleotide
ctcatgaagaagctttgcgt

SEQ ID NO: 900 - DNA, 20 bp, Artificial Sequence
  Description of Artificial Sequence: Synthetic oligonucleotide
tgagggaatctaagactttg

SEQ ID NO: 901 - DNA, 20 bp, Artificial Sequence
  Description of Artificial Sequence: Synthetic oligonucleotide
caatgtggacctgctcccga

SEQ ID NO: 902 - DNA, 20 bp, Artificial Sequence
  Description of Artificial Sequence: Synthetic oligonucleotide
ggggccccgagaacgcatct

SEQ ID NO: 903 - DNA, 20 bp, Artificial Sequence
  Description of Artificial Sequence: Synthetic oligonucleotide
aagaaacgggtgcaggcctg

SEQ ID NO: 904 - DNA, 20 bp, Artificial Sequence
  Description of Artificial Sequence: Synthetic oligonucleotide
gactcggccacaaagcgccc

SEQ ID NO: 905 - DNA, 20 bp, Artificial Sequence
  Description of Artificial Sequence: Synthetic oligonucleotide
gacccctgttggggtcctgt

SEQ ID NO: 906 - DNA, 20 bp, Artificial Sequence
  Description of Artificial Sequence: Synthetic oligonucleotide
aagtcgcgagaggccgcgta

SEQ ID NO: 907 - DNA, 20 bp, Artificial Sequence
  Description of Artificial Sequence: Synthetic oligonucleotide
acaaagtctttccggggcac

SEQ ID NO: 908 - DNA, 20 bp, Artificial Sequence
  Description of Artificial Sequence: Synthetic oligonucleotide
ccgtgccaggcgtgtgtgca

SEQ ID NO: 909 - DNA, 20 bp, Artificial Sequence
  Description of Artificial Sequence: Synthetic oligonucleotide
tttgagctgtccttgggcag

SEQ ID NO: 910 - DNA, 20 bp, Artificial Sequence
  Description of Artificial Sequence: Synthetic oligonucleotide
ctaagggcatggcatttcat

SEQ ID NO: 911 - DNA, 20 bp, Artificial Sequence
  Description of Artificial Sequence: Synthetic oligonucleotide
ccaattctcctattgttgcc

SEQ ID NO: 912 - DNA, 20 bp, Artificial Sequence
  Description of Artificial Sequence: Synthetic oligonucleotide
acagcttaggacatggttca

SEQ ID NO: 913 - DNA, 20 bp, Artificial Sequence
  Description of Artificial Sequence: Synthetic oligonucleotide
caagtactgcaaagatctca

SEQ ID NO: 914 - DNA, 20 bp, Artificial Sequence
  Description of Artificial Sequence: Synthetic oligonucleotide
tcgccacccaggcatgccca

SEQ ID NO: 915 - DNA, 20 bp, Artificial Sequence
  Description of Artificial Sequence: Synthetic oligonucleotide
gcagctccttgatatcctgc

SEQ ID NO: 916 - DNA, 20 bp, Artificial Sequence
  Description of Artificial Sequence: Synthetic oligonucleotide
catgggaagctgagctgcat

SEQ ID NO: 917 - DNA, 20 bp, Artificial Sequence
  Description of Artificial Sequence: Synthetic oligonucleotide
tgggctggcaggtgctgaca

SEQ ID NO: 918 - DNA, 20 bp, Artificial Sequence
  Description of Artificial Sequence: Synthetic oligonucleotide
gccggctgcttctgccctga

SEQ ID NO: 919 - DNA, 20 bp, Artificial Sequence
  Description of Artificial Sequence: Synthetic oligonucleotide
aaggccatcaagattttcct

SEQ ID NO: 920 - DNA, 20 bp, Artificial Sequence
  Description of Artificial Sequence: Synthetic oligonucleotide
gcgtgacactgagcctggat

SEQ ID NO: 921 - DNA, 20 bp, Artificial Sequence
  Description of Artificial Sequence: Synthetic oligonucleotide
ttccttcaaagaagcagtat

SEQ ID NO: 922 - DNA, 20 bp, Artificial Sequence
  Description of Artificial Sequence: Synthetic oligonucleotide
cttaaaaacttggtactacc

SEQ ID NO: 923 - DNA, 20 bp, Artificial Sequence
  Description of Artificial Sequence: Synthetic oligonucleotide
gaaccgagctgaagctgcca

SEQ ID NO: 924 - DNA, 20 bp, Artificial Sequence
  Description of Artificial Sequence: Synthetic oligonucleotide
tatgtcctacagatcaaaag

SEQ ID NO: 925 - DNA, 20 bp, Artificial Sequence
  Description of Artificial Sequence: Synthetic oligonucleotide
aggaccacagtcatactcca

SEQ ID NO: 926 - DNA, 20 bp, Artificial Sequence
  Description of Artificial Sequence: Synthetic oligonucleotide
tctgccgcaggattcatctc

SEQ ID NO: 927 - DNA, 20 bp, Artificial Sequence
  Description of Artificial Sequence: Synthetic oligonucleotide
catctcgggccggaggacag

SEQ ID NO: 928 - DNA, 20 bp, Artificial Sequence
  Description of Artificial Sequence: Synthetic oligonucleotide
ccgcaggattcatctcgggc

SEQ ID NO: 929 - DNA, 20 bp, Artificial Sequence
  Description of Artificial Sequence: Synthetic oligonucleotide
ccggcccgagatgaatcctg

SEQ ID NO: 930 - DNA, 20 bp, Artificial Sequence
  Description of Artificial Sequence: Synthetic oligonucleotide
gctcacttggttaacttcaa

SEQ ID NO: 931 - DNA, 20 bp, Artificial Sequence
  Description of Artificial Sequence: Synthetic oligonucleotide
tctttctgcgtcctactagc

SEQ ID NO: 932 - DNA, 20 bp, Artificial Sequence
  Description of Artificial Sequence: Synthetic oligonucleotide
agaaatacagtggaattcgc

SEQ ID NO: 933 - DNA, 20 bp, Artificial Sequence
  Description of Artificial Sequence: Synthetic oligonucleotide
tccacacattgtaatcagac

SEQ ID NO: 934 - DNA, 20 bp, Artificial Sequence
  Description of Artificial Sequence: Synthetic oligonucleotide
ggacattaaagcctgacgac

SEQ ID NO: 935 - DNA, 20 bp, Artificial Sequence
  Description of Artificial Sequence: Synthetic oligonucleotide
cagtggaattcgctgggcaa

SEQ ID NO: 936 - DNA, 20 bp, Artificial Sequence
  Description of Artificial Sequence: Synthetic oligonucleotide
attcaggaatataaacaagc

SEQ ID NO: 937 - DNA, 20 bp, Artificial Sequence
  Description of Artificial Sequence: Synthetic oligonucleotide
ttccagttaaagttgtggcc

SEQ ID NO: 938 - DNA, 20 bp, Artificial Sequence
  Description of Artificial Sequence: Synthetic oligonucleotide
tggtttatccagctgctgct

SEQ ID NO: 939 - DNA, 20 bp, Artificial Sequence
  Description of Artificial Sequence: Synthetic oligonucleotide
caagaaagccaaacgaggag

SEQ ID NO: 940 - DNA, 20 bp, Artificial Sequence
  Description of Artificial Sequence: Synthetic oligonucleotide
ccgactttgtgtcatagcct

SEQ ID NO: 941 - DNA, 20 bp, Artificial Sequence
  Description of Artificial Sequence: Synthetic oligonucleotide
tccaggttgatctcgcagtt

SEQ ID NO: 942 - DNA, 20 bp, Artificial Sequence
  Description of Artificial Sequence: Synthetic oligonucleotide
gttgatgttggtctggcagt

SEQ ID NO: 943 - DNA, 20 bp, Artificial Sequence
  Description of Artificial Sequence: Synthetic oligonucleotide
cgcaggggttggaggcgcac

SEQ ID NO: 944 - DNA, 20 bp, Artificial Sequence
  Description of Artificial Sequence: Synthetic oligonucleotide
ttgatgttggtctggcagtt

SEQ ID NO: 945 - DNA, 20 bp, Artificial Sequence
  Description of Artificial Sequence: Synthetic oligonucleotide
ggcccgcgatgctcccagcc

SEQ ID NO: 946 - DNA, 20 bp, Artificial Sequence
  Description of Artificial Sequence: Synthetic oligonucleotide
agtacagtttccatggatgc

SEQ ID NO: 947 - DNA, 20 bp, Artificial Sequence
  Description of Artificial Sequence: Synthetic oligonucleotide
atgctcacaaggattgctat

SEQ ID NO: 948 - DNA, 20 bp, Artificial Sequence
  Description of Artificial Sequence: Synthetic oligonucleotide
gctacctgtctggataagat

SEQ ID NO: 949 - DNA, 20 bp, Artificial Sequence
  Description of Artificial Sequence: Synthetic oligonucleotide
caggtgctcccttcaaaacc

SEQ ID NO: 950 - DNA, 20 bp, Artificial Sequence
  Description of Artificial Sequence: Synthetic oligonucleotide
tcagaatggaggggtttgtg

SEQ ID NO: 951 - DNA, 20 bp, Artificial Sequence
  Description of Artificial Sequence: Synthetic oligonucleotide
catgtcccaccggccctgca

SEQ ID NO: 952 - DNA, 20 bp, Artificial Sequence
  Description of Artificial Sequence: Synthetic oligonucleotide
caaatggcccggccgttcac

SEQ ID NO: 953 - DNA, 20 bp, Artificial Sequence
  Description of Artificial Sequence: Synthetic oligonucleotide
ggtcgcggccggccgccatg

SEQ ID NO: 954 - DNA, 20 bp, Artificial Sequence
  Description of Artificial Sequence: Synthetic oligonucleotide
gcacctgcccaagtgctcgc

SEQ ID NO: 955 - DNA, 20 bp, Artificial Sequence
  Description of Artificial Sequence: Synthetic oligonucleotide
gtgaacgtggacgactgtcc

SEQ ID NO: 956 - DNA, 20 bp, Artificial Sequence
  Description of Artificial Sequence: Synthetic oligonucleotide
cagaggcaaaagaaggctcc

SEQ ID NO: 957 - DNA, 20 bp, Artificial Sequence
  Description of Artificial Sequence: Synthetic oligonucleotide
tcctaggggctgttcgaatg

SEQ ID NO: 958 - DNA, 20 bp, Artificial Sequence
  Description of Artificial Sequence: Synthetic oligonucleotide
tatggcaggaggtgcctttg

SEQ ID NO: 959 - DNA, 20 bp, Artificial Sequence
  Description of Artificial Sequence: Synthetic oligonucleotide
ccacgttgtgagctgcgggc

SEQ ID NO: 960 - DNA, 20 bp, Artificial Sequence
  Description of Artificial Sequence: Synthetic oligonucleotide
gcacaggttgggagcacaca

SEQ ID NO: 961 - DNA, 20 bp, Artificial Sequence
  Description of Artificial Sequence: Synthetic oligonucleotide
tgtagacataacaggtgtgc

SEQ ID NO: 962 - DNA, 20 bp, Artificial Sequence
  Description of Artificial Sequence: Synthetic oligonucleotide
tcgctccatacagtataatt

SEQ ID NO: 963 - DNA, 20 bp, Artificial Sequence
  Description of Artificial Sequence: Synthetic oligonucleotide
aatacctggaccaaacaaat

SEQ ID NO: 964 - DNA, 20 bp, Artificial Sequence
  Description of Artificial Sequence: Synthetic oligonucleotide
cagcatggcagagctgtact

SEQ ID NO: 965 - DNA, 20 bp, Artificial Sequence
  Description of Artificial Sequence: Synthetic oligonucleotide
agagaaaggtcacgaatgcc

SEQ ID NO: 966 - DNA, 20 bp, Artificial Sequence
  Description of Artificial Sequence: Synthetic oligonucleotide
cagtgtgcttgctcaggaga

SEQ ID NO: 967 - DNA, 20 bp, Artificial Sequence
  Description of Artificial Sequence: Synthetic oligonucleotide
gacttctataaaaccctaag

SEQ ID NO: 968 - DNA, 20 bp, Artificial Sequence
  Description of Artificial Sequence: Synthetic oligonucleotide
tttggaaggaaactcgaatg

SEQ ID NO: 969 - DNA, 20 bp, Artificial Sequence
  Description of Artificial Sequence: Synthetic oligonucleotide
tcatcgaactctgcacccct

SEQ ID NO: 970 - DNA, 20 bp, Artificial Sequence
  Description of Artificial Sequence: Synthetic oligonucleotide
tccaaagaatcattaactcc

SEQ ID NO: 971 - DNA, 20 bp, Artificial Sequence
  Description of Artificial Sequence: Synthetic oligonucleotide
tgaaatgactgagtacaaac

SEQ ID NO: 972 - DNA, 20 bp, Artificial Sequence
  Description of Artificial Sequence: Synthetic oligonucleotide
agagaccaatacatgaggac

SEQ ID NO: 973 - DNA, 20 bp, Artificial Sequence
  Description of Artificial Sequence: Synthetic oligonucleotide
tgaatatgatcccaccatag

SEQ ID NO: 974 - DNA, 20 bp, Artificial Sequence
  Description of Artificial Sequence: Synthetic oligonucleotide
gatcatattcatctacaaag

SEQ ID NO: 975 - DNA, 20 bp, Artificial Sequence
  Description of Artificial Sequence: Synthetic oligonucleotide
gagtacaaactggtggtggt

SEQ ID NO: 976 - DNA, 20 bp, Artificial Sequence
  Description of Artificial Sequence: Synthetic oligonucleotide
gtgtgcagctgcacactggc

SEQ ID NO: 977 - DNA, 20 bp, Artificial Sequence
  Description of Artificial Sequence: Synthetic oligonucleotide
gcatccccttctctgtggat

SEQ ID NO: 978 - DNA, 20 bp, Artificial Sequence
  Description of Artificial Sequence: Synthetic oligonucleotide
ctctcctggaaaactgtgca

SEQ ID NO: 979 - DNA, 20 bp, Artificial Sequence
  Description of Artificial Sequence: Synthetic oligonucleotide
cggcggtggagatgcaccac

SEQ ID NO: 980 - DNA, 20 bp, Artificial Sequence
  Description of Artificial Sequence: Synthetic oligonucleotide
ccagcgctgtagccagcgca

SEQ ID NO: 981 - DNA, 20 bp, Artificial Sequence
  Description of Artificial Sequence: Synthetic oligonucleotide
ttatagaaccactgaagcgc

SEQ ID NO: 982 - DNA, 20 bp, Artificial Sequence
  Description of Artificial Sequence: Synthetic oligonucleotide
ggattctggattaaaatttg

SEQ ID NO: 983 - DNA, 20 bp, Artificial Sequence
  Description of Artificial Sequence: Synthetic oligonucleotide
cccgccatggcgcggctctg

SEQ ID NO: 984 - DNA, 20 bp, Artificial Sequence
  Description of Artificial Sequence: Synthetic oligonucleotide
gaagccccagagccgcgcca

SEQ ID NO: 985 - DNA, 20 bp, Artificial Sequence
  Description of Artificial Sequence: Synthetic oligonucleotide
gccgtggtactccgtgtgat

SEQ ID NO: 986 - DNA, 20 bp, Artificial Sequence
  Description of Artificial Sequence: Synthetic oligonucleotide
caccccttcctgatgtggac

SEQ ID NO: 987 - DNA, 20 bp, Artificial Sequence
  Description of Artificial Sequence: Synthetic oligonucleotide
gcaagactgagatcaattgc

SEQ ID NO: 988 - DNA, 20 bp, Artificial Sequence
  Description of Artificial Sequence: Synthetic oligonucleotide
actgcagctgtgacatccgc

SEQ ID NO: 989 - DNA, 20 bp, Artificial Sequence
  Description of Artificial Sequence: Synthetic oligonucleotide
gccagaaactacacttggct

SEQ ID NO: 990 - DNA, 20 bp, Artificial Sequence
  Description of Artificial Sequence: Synthetic oligonucleotide
ctgatgttcatgcggaagag

SEQ ID NO: 991 - DNA, 20 bp, Artificial Sequence
  Description of Artificial Sequence: Synthetic oligonucleotide
gaacaactcctgaaggctct

SEQ ID NO: 992 - DNA, 20 bp, Artificial Sequence
  Description of Artificial Sequence: Synthetic oligonucleotide
ccacctcaacgtcagggtgc

SEQ ID NO: 993 - DNA, 20 bp, Artificial Sequence
  Description of Artificial Sequence: Synthetic oligonucleotide
acggaggcgctggtttctgg

SEQ ID NO: 994 - DNA, 20 bp, Artificial Sequence
  Description of Artificial Sequence: Synthetic oligonucleotide
gcaagtgccttctggggagt

SEQ ID NO: 995 - DNA, 20 bp, Artificial Sequence
  Description of Artificial Sequence: Synthetic oligonucleotide
gtagctgatggcatggtgtt

SEQ ID NO: 996 - DNA, 20 bp, Artificial Sequence
  Description of Artificial Sequence: Synthetic oligonucleotide
aactcgtagatgccagagac

SEQ ID NO: 997 - DNA, 20 bp, Artificial Sequence
  Description of Artificial Sequence: Synthetic oligonucleotide
atggtatgccaggaaggtca

SEQ ID NO: 998 - DNA, 20 bp, Artificial Sequence
  Description of Artificial Sequence: Synthetic oligonucleotide
atctacgagttttcttggca

SEQ ID NO: 999 - DNA, 20 bp, Artificial Sequence
  Description of Artificial Sequence: Synthetic oligonucleotide
agctttgccctttaacagca

SEQ ID NO: 1000 - DNA, 20 bp, Artificial Sequence
  Description of Artificial Sequence: Synthetic oligonucleotide
agcaagatggtatgccagga

SEQ ID NO: 1001 - DNA, 20 bp, Artificial Sequence
  Description of Artificial Sequence: Synthetic oligonucleotide
catcttctagccttgtgaag

SEQ ID NO: 1002 - DNA, 20 bp, Artificial Sequence
  Description of Artificial Sequence: Synthetic oligonucleotide
ggaccactttgtgtctcacc

SEQ ID NO: 1003 - DNA, 20 bp, Artificial Sequence
  Description of Artificial Sequence: Synthetic oligonucleotide
tgatgagcttctgcgtggct

SEQ ID NO: 1004 - DNA, 20 bp, Artificial Sequence
  Description of Artificial Sequence: Synthetic oligonucleotide
tgtccactcagcagcaaccc

SEQ ID NO: 1005 - DNA, 20 bp, Artificial Sequence
  Description of Artificial Sequence: Synthetic oligonucleotide
cgataagtgtgtacttgccc

SEQ ID NO: 1006 - DNA, 20 bp, Artificial Sequence
  Description of Artificial Sequence: Synthetic oligonucleotide
gaaatgcaccattttcatag

SEQ ID NO: 1007 - DNA, 20 bp, Artificial Sequence
  Description of Artificial Sequence: Synthetic oligonucleotide
tcttagacccattgttgtca

SEQ ID NO: 1008 - DNA, 20 bp, Artificial Sequence
  Description of Artificial Sequence: Synthetic oligonucleotide
tatgccaattaagaatcata

SEQ ID NO: 1009 - DNA, 20 bp, Artificial Sequence
  Description of Artificial Sequence: Synthetic oligonucleotide
gcacgaggactctgctgcaa

SEQ ID NO: 1010 - DNA, 20 bp, Artificial Sequence
  Description of Artificial Sequence: Synthetic oligonucleotide
caagggacaagagcaagatt

SEQ ID NO: 1011 - DNA, 20 bp, Artificial Sequence
  Description of Artificial Sequence: Synthetic oligonucleotide
cggagatccactcccgagac

SEQ ID NO: 1012 - DNA, 20 bp, Artificial Sequence
  Description of Artificial Sequence: Synthetic oligonucleotide
tgcgggcctacccacctccc

SEQ ID NO: 1013 - DNA, 20 bp, Artificial Sequence
  Description of Artificial Sequence: Synthetic oligonucleotide
tgcctcctacgacagcagac

SEQ ID NO: 1014 - DNA, 20 bp, Artificial Sequence
  Description of Artificial Sequence: Synthetic oligonucleotide
gtgcctcggcggcccacaca

SEQ ID NO: 1015 - DNA, 20 bp, Artificial Sequence
  Description of Artificial Sequence: Synthetic oligonucleotide
atgatcaccatggctcaact

SEQ ID NO: 1016 - DNA, 20 bp, Artificial Sequence
  Description of Artificial Sequence: Synthetic oligonucleotide
cgcgcaacgtgtcggagacc

SEQ ID NO: 1017 - DNA, 20 bp, Artificial Sequence
  Description of Artificial Sequence: Synthetic oligonucleotide
caggacagtgggcggtgggt

SEQ ID NO: 1018 - DNA, 20 bp, Artificial Sequence
  Description of Artificial Sequence: Synthetic oligonucleotide
gcatcggagccggacactgc

SEQ ID NO: 1019 - DNA, 20 bp, Artificial Sequence
  Description of Artificial Sequence: Synthetic oligonucleotide
ctactatgtctacagactcc

SEQ ID NO: 1020 - DNA, 20 bp, Artificial Sequence
  Description of Artificial Sequence: Synthetic oligonucleotide
gtgacactgcacgagaagaa

SEQ ID NO: 1021 - DNA, 20 bp, Artificial Sequence
  Description of Artificial Sequence: Synthetic oligonucleotide
tgctgggaacggctcgtcag

SEQ ID NO: 1022 - DNA, 20 bp, Artificial Sequence
  Description of Artificial Sequence: Synthetic oligonucleotide
cgagccgttcccagcagaca

SEQ ID NO: 1023 - DNA, 20 bp, Artificial Sequence
  Description of Artificial Sequence: Synthetic oligonucleotide
taaagatccgttctggggac

SEQ ID NO: 1024 - DNA, 20 bp, Artificial Sequence
  Description of Artificial Sequence: Synthetic oligonucleotide
ggcttcatcttctcccgcag

SEQ ID NO: 1025 - DNA, 20 bp, Artificial Sequence
  Description of Artificial Sequence: Synthetic oligonucleotide
tcagctccacgtaggagggc

SEQ ID NO: 1026 - DNA, 20 bp, Artificial Sequence
  Description of Artificial Sequence: Synthetic oligonucleotide
ggtcctaacaaacataagca

SEQ ID NO: 1027 - DNA, 20 bp, Artificial Sequence
  Description of Artificial Sequence: Synthetic oligonucleotide
ggattgggaaagaccatggc

SEQ ID NO: 1028 - DNA, 20 bp, Artificial Sequence
  Description of Artificial Sequence: Synthetic oligonucleotide
cactggattgggaaagacca

SEQ ID NO: 1029 - DNA, 20 bp, Artificial Sequence
  Description of Artificial Sequence: Synthetic oligonucleotide
catggtctttcccaatccag

SEQ ID NO: 1030 - DNA, 20 bp, Artificial Sequence
  Description of Artificial Sequence: Synthetic oligonucleotide
aagttctccaagaagagtga

SEQ ID NO: 1031 - DNA, 20 bp, Artificial Sequence
  Description of Artificial Sequence: Synthetic oligonucleotide
atgcctccacgaccatcatc

SEQ ID NO: 1032 - DNA, 20 bp, Artificial Sequence
  Description of Artificial Sequence: Synthetic oligonucleotide
cttcaatcactgacatatct

SEQ ID NO: 1033 - DNA, 20 bp, Artificial Sequence
  Description of Artificial Sequence: Synthetic oligonucleotide
tgcactatttataacccaaa

SEQ ID NO: 1034 - DNA, 20 bp, Artificial Sequence
  Description of Artificial Sequence: Synthetic oligonucleotide
gagtaccttgttccaatccc

SEQ ID NO: 1035 - DNA, 20 bp, Artificial Sequence
  Description of Artificial Sequence: Synthetic oligonucleotide
ggttaaagatccagaagtac

SEQ ID NO: 1036 - DNA, 20 bp, Artificial Sequence
  Description of Artificial Sequence: Synthetic oligonucleotide
cctgccccattttatacttg

SEQ ID NO: 1037 - DNA, 20 bp, Artificial Sequence
  Description of Artificial Sequence: Synthetic oligonucleotide
atcgtatttacccacgctac

SEQ ID NO: 1038 - DNA, 20 bp, Artificial Sequence
  Description of Artificial Sequence: Synthetic oligonucleotide
acttgtgggattgtcttgga

SEQ ID NO: 1039 - DNA, 20 bp, Artificial Sequence
  Description of Artificial Sequence: Synthetic oligonucleotide
tataggagtcaatatccata

SEQ ID NO: 1040 - DNA, 20 bp, Artificial Sequence
  Description of Artificial Sequence: Synthetic oligonucleotide
cactgggatttatatccagt

SEQ ID NO: 1041 - DNA, 20 bp, Artificial Sequence
  Description of Artificial Sequence: Synthetic oligonucleotide
tacaaggaccagcttaagac

SEQ ID NO: 1042 - DNA, 20 bp, Artificial Sequence
  Description of Artificial Sequence: Synthetic oligonucleotide
ccgcagggtaccaggccccc

SEQ ID NO: 1043 - DNA, 20 bp, Artificial Sequence
  Description of Artificial Sequence: Synthetic oligonucleotide
atgggaggtggtttggcacg

SEQ ID NO: 1044 - DNA, 20 bp, Artificial Sequence
  Description of Artificial Sequence: Synthetic oligonucleotide
acgcaggatgccccctgggg

SEQ ID NO: 1045 - DNA, 20 bp, Artificial Sequence
  Description of Artificial Sequence: Synthetic oligonucleotide
gatgcggaacggctgctcca

SEQ ID NO: 1046 - DNA, 20 bp, Artificial Sequence
  Description of Artificial Sequence: Synthetic oligonucleotide
cctcctctgtgaagggtttg

SEQ ID NO: 1047 - DNA, 20 bp, Artificial Sequence
  Description of Artificial Sequence: Synthetic oligonucleotide
cagagagcgatttaatatca

SEQ ID NO: 1048 - DNA, 20 bp, Artificial Sequence
  Description of Artificial Sequence: Synthetic oligonucleotide
gatgactgcacgggagtcac

SEQ ID NO: 1049 - DNA, 20 bp, Artificial Sequence
  Description of Artificial Sequence: Synthetic oligonucleotide
tttagagttccatatgatcc

SEQ ID NO: 1050 - DNA, 20 bp, Artificial Sequence
  Description of Artificial Sequence: Synthetic oligonucleotide
ggacgtcacccacgggtgca

SEQ ID NO: 1051 - DNA, 20 bp, Artificial Sequence
  Description of Artificial Sequence: Synthetic oligonucleotide
gccgctcgaaccagtccagc

SEQ ID NO: 1052 - DNA, 20 bp, Artificial Sequence
  Description of Artificial Sequence: Synthetic oligonucleotide
aaggagcgggtgaccgagtg

SEQ ID NO: 1053 - DNA, 20 bp, Artificial Sequence
  Description of Artificial Sequence: Synthetic oligonucleotide
gaaggagcgggtgaccgagt

SEQ ID NO: 1054 - DNA, 20 bp, Artificial Sequence
  Description of Artificial Sequence: Synthetic oligonucleotide
tgaaggagcgggtgaccgag

SEQ ID NO: 1055 - DNA, 20 bp, Artificial Sequence
  Description of Artificial Sequence: Synthetic oligonucleotide
ggtggtgctgctgcgcaagg

SEQ ID NO: 1056 - DNA, 20 bp, Artificial Sequence
  Description of Artificial Sequence: Synthetic oligonucleotide
cgtaggtagtatcgggcctc

SEQ ID NO: 1057 - DNA, 20 bp, Artificial Sequence
  Description of Artificial Sequence: Synthetic oligonucleotide
caaccaaagtcgaatatgac

SEQ ID NO: 1058 - DNA, 20 bp, Artificial Sequence
  Description of Artificial Sequence: Synthetic oligonucleotide
tggtgttggagctctgccgc

SEQ ID NO: 1059 - DNA, 20 bp, Artificial Sequence
  Description of Artificial Sequence: Synthetic oligonucleotide
aggtggatgtgtggtccatt

SEQ ID NO: 1060 - DNA, 20 bp, Artificial Sequence
  Description of Artificial Sequence: Synthetic oligonucleotide
aagtcgaatatgacggggag

SEQ ID NO: 1061 - DNA, 20 bp, Artificial Sequence
  Description of Artificial Sequence: Synthetic oligonucleotide
gcagtagcgcttcccagtcg

SEQ ID NO: 1062 - DNA, 20 bp, Artificial Sequence
  Description of Artificial Sequence: Synthetic oligonucleotide
gagtagctaaacctcatcaa

SEQ ID NO: 1063 - DNA, 20 bp, Artificial Sequence
  Description of Artificial Sequence: Synthetic oligonucleotide
cagaagttcgatactacctc

SEQ ID NO: 1064 - DNA, 20 bp, Artificial Sequence
  Description of Artificial Sequence: Synthetic oligonucleotide
agtagctaaacctcatcaaa

SEQ ID NO: 1065 - DNA, 20 bp, Artificial Sequence
  Description of Artificial Sequence: Synthetic oligonucleotide
actcggggccggagatctcg

SEQ ID NO: 1066 - DNA, 20 bp, Artificial Sequence
  Description of Artificial Sequence: Synthetic oligonucleotide
aggcccgaaggatggcggcc

SEQ ID NO: 1067 - DNA, 20 bp, Artificial Sequence
  Description of Artificial Sequence: Synthetic oligonucleotide
cttgcaccgggacctcaagt

SEQ ID NO: 1068 - DNA, 20 bp, Artificial Sequence
  Description of Artificial Sequence: Synthetic oligonucleotide
ctgctccggaggctccaacc

SEQ ID NO: 1069 - DNA, 20 bp, Artificial Sequence
  Description of Artificial Sequence: Synthetic oligonucleotide
ggcttggcgacgcggctctg

SEQ ID NO: 1070 - DNA, 20 bp, Artificial Sequence
  Description of Artificial Sequence: Synthetic oligonucleotide
cttcaggtcagccgtctcaa

SEQ ID NO: 1071 - DNA, 20 bp, Artificial Sequence
  Description of Artificial Sequence: Synthetic oligonucleotide
tcacagtcgtcgccgtgcac

SEQ ID NO: 1072 - DNA, 20 bp, Artificial Sequence
  Description of Artificial Sequence: Synthetic oligonucleotide
gtcacctagcagaccatcct

SEQ ID NO: 1073 - DNA, 20 bp, Artificial Sequence
  Description of Artificial Sequence: Synthetic oligonucleotide
tgggaccaacacatctagcc

SEQ ID NO: 1074 - DNA, 20 bp, Artificial Sequence
  Description of Artificial Sequence: Synthetic oligonucleotide
tcaactttacaccaactgac

SEQ ID NO: 1075 - DNA, 20 bp, Artificial Sequence
  Description of Artificial Sequence: Synthetic oligonucleotide
gtcgccgtgcacaggtgcca

SEQ ID NO: 1076 - DNA, 20 bp, Artificial Sequence
  Description of Artificial Sequence: Synthetic oligonucleotide
catcctcatctacctactca

SEQ ID NO: 1077 - DNA, 20 bp, Artificial Sequence
  Description of Artificial Sequence: Synthetic oligonucleotide
catgcaagcaccgtggcagg

SEQ ID NO: 1078 - DNA, 20 bp, Artificial Sequence
  Description of Artificial Sequence: Synthetic oligonucleotide
ggcggccttggacagcttgt

SEQ ID NO: 1079 - DNA, 20 bp, Artificial Sequence
  Description of Artificial Sequence: Synthetic oligonucleotide
ccatccgtgggggtctgcaa

SEQ ID NO: 1080 - DNA, 20 bp, Artificial Sequence
  Description of Artificial Sequence: Synthetic oligonucleotide
aatggccacctttagccgcc

SEQ ID NO: 1081 - DNA, 20 bp, Artificial Sequence
  Description of Artificial Sequence: Synthetic oligonucleotide
cccataacagcatggaatag

SEQ ID NO: 1082 - DNA, 20 bp, Artificial Sequence
  Description of Artificial Sequence: Synthetic oligonucleotide
acgacattcaattgccatga

SEQ ID NO: 1083 - DNA, 20 bp, Artificial Sequence
  Description of Artificial Sequence: Synthetic oligonucleotide
agagccttccaactccctca

SEQ ID NO: 1084 - DNA, 20 bp, Artificial Sequence
  Description of Artificial Sequence: Synthetic oligonucleotide
tcatgcttgtgaaggatgca

SEQ ID NO: 1085 - DNA, 20 bp, Artificial Sequence
  Description of Artificial Sequence: Synthetic oligonucleotide
agtgaagggcttgatatcaa

SEQ ID NO: 1086 - DNA, 20 bp, Artificial Sequence
  Description of Artificial Sequence: Synthetic oligonucleotide
aaaagaatccaacgtgcaag

SEQ ID NO: 1087 - DNA, 20 bp, Artificial Sequence
  Description of Artificial Sequence: Synthetic oligonucleotide
aacgcatcaccattcttcga

SEQ ID NO: 1088 - DNA, 20 bp, Artificial Sequence
  Description of Artificial Sequence: Synthetic oligonucleotide
acatcgaacctcttgcacgt

SEQ ID NO: 1089 - DNA, 20 bp, Artificial Sequence
  Description of Artificial Sequence: Synthetic oligonucleotide
gaccacagcaagtcacacat

SEQ ID NO: 1090 - DNA, 20 bp, Artificial Sequence
  Description of Artificial Sequence: Synthetic oligonucleotide
agctcaccagctagtgatgg

SEQ ID NO: 1091 - DNA, 20 bp, Artificial Sequence
  Description of Artificial Sequence: Synthetic oligonucleotide
agtcgtcggtctttgtctga

SEQ ID NO: 1092 - DNA, 20 bp, Artificial Sequence
  Description of Artificial Sequence: Synthetic oligonucleotide
tgtccccagcctctgcggaa

SEQ ID NO: 1093 - DNA, 20 bp, Artificial Sequence
  Description of Artificial Sequence: Synthetic oligonucleotide
cttgtgaacgttcatatcgc

SEQ ID NO: 1094 - DNA, 20 bp, Artificial Sequence
  Description of Artificial Sequence: Synthetic oligonucleotide
caaccgcttcgcccgcaaag

SEQ ID NO: 1095 - DNA, 20 bp, Artificial Sequence
  Description of Artificial Sequence: Synthetic oligonucleotide
gagggggcggatttacctaa

SEQ ID NO: 1096 - DNA, 20 bp, Artificial Sequence
  Description of Artificial Sequence: Synthetic oligonucleotide
gggtcagccatcttgcgcgc

SEQ ID NO: 1097 - DNA, 20 bp, Artificial Sequence
  Description of Artificial Sequence: Synthetic oligonucleotide
gtgctctcctcgccctcgct

SEQ ID NO: 1098 - DNA, 20 bp, Artificial Sequence
  Description of Artificial Sequence: Synthetic oligonucleotide
tggtccgtgccacacaggct

SEQ ID NO: 1099 - DNA, 20 bp, Artificial Sequence
  Description of Artificial Sequence: Synthetic oligonucleotide
ggtcagccatcttgcgcgcg

SEQ ID NO: 1100 - DNA, 20 bp, Artificial Sequence
  Description of Artificial Sequence: Synthetic oligonucleotide
ccacgttttgtgaccactgt

SEQ ID NO: 1101 - DNA, 20 bp, Artificial Sequence
  Description of Artificial Sequence: Synthetic oligonucleotide
cgactcgcgcatcggccaaa

SEQ ID NO: 1102 - DNA, 20 bp, Artificial Sequence
  Description of Artificial Sequence: Synthetic oligonucleotide
tggcgcagcgaccaggctgt

SEQ ID NO: 1103 - DNA, 20 bp, Artificial Sequence
  Description of Artificial Sequence: Synthetic oligonucleotide
atgcggccgaggaagcggca

SEQ ID NO: 1104 - DNA, 20 bp, Artificial Sequence
  Description of Artificial Sequence: Synthetic oligonucleotide
gaacgggagccgccacttcg

SEQ ID NO: 1105 - DNA, 20 bp, Artificial Sequence
  Description of Artificial Sequence: Synthetic oligonucleotide
acactaccatggtcggggcg

SEQ ID NO: 1106 - DNA, 20 bp, Artificial Sequence
  Description of Artificial Sequence: Synthetic oligonucleotide
tttctgcaaaacaggggccg

SEQ ID NO: 1107 - DNA, 20 bp, Artificial Sequence
  Description of Artificial Sequence: Synthetic oligonucleotide
gcgattcagaggggggaccc

SEQ ID NO: 1108 - DNA, 20 bp, Artificial Sequence
  Description of Artificial Sequence: Synthetic oligonucleotide
ggagctgctcaaggcgcccg

SEQ ID NO: 1109 - DNA, 20 bp, Artificial Sequence
  Description of Artificial Sequence: Synthetic oligonucleotide
cggcgtaggcgattcagagg

SEQ ID NO: 1110 - DNA, 20 bp, Artificial Sequence
  Description of Artificial Sequence: Synthetic oligonucleotide
tacgtggatctcatctgctg

SEQ ID NO: 1111 - DNA, 20 bp, Artificial Sequence
  Description of Artificial Sequence: Synthetic oligonucleotide
ctcattgcaaaggccctcaa

SEQ ID NO: 1112 - DNA, 20 bp, Artificial Sequence
  Description of Artificial Sequence: Synthetic oligonucleotide
aaactcgtcacaattgaatg

SEQ ID NO: 1113 - DNA, 20 bp, Artificial Sequence
  Description of Artificial Sequence: Synthetic oligonucleotide
aactcgtcacaattgaatgt

SEQ ID NO: 1114 - DNA, 20 bp, Artificial Sequence
  Description of Artificial Sequence: Synthetic oligonucleotide
caccatgaaatggatagatg

SEQ ID NO: 1115 - DNA, 20 bp, Artificial Sequence
  Description of Artificial Sequence: Synthetic oligonucleotide
ttaaattatcttcatgagcg

SEQ ID NO: 1116 - DNA, 20 bp, Artificial Sequence
  Description of Artificial Sequence: Synthetic oligonucleotide
cgcttatagagctggtacat

SEQ ID NO: 1117 - DNA, 20 bp, Artificial Sequence
  Description of Artificial Sequence: Synthetic oligonucleotide
ctgtgaacttttacatagca

SEQ ID NO: 1118 - DNA, 20 bp, Artificial Sequence
  Description of Artificial Sequence: Synthetic oligonucleotide
aagccacgcagatgccagaa

SEQ ID NO: 1119 - DNA, 20 bp, Artificial Sequence
  Description of Artificial Sequence: Synthetic oligonucleotide
tgtagcactccaacgcggcc

SEQ ID NO: 1120 - DNA, 20 bp, Artificial Sequence
  Description of Artificial Sequence: Synthetic oligonucleotide
tgatgaagagctatgtggcc

SEQ ID NO: 1121 - DNA, 20 bp, Artificial Sequence
  Description of Artificial Sequence: Synthetic oligonucleotide
tgtcccaggcctccaccagc

SEQ ID NO: 1122 - DNA, 20 bp, Artificial Sequence
  Description of Artificial Sequence: Synthetic oligonucleotide
ggaagtcctccatctgtccc

SEQ ID NO: 1123 - DNA, 20 bp, Artificial Sequence
  Description of Artificial Sequence: Synthetic oligonucleotide
attattcactgacttaccac

SEQ ID NO: 1124 - DNA, 20 bp, Artificial Sequence
  Description of Artificial Sequence: Synthetic oligonucleotide
ataaggaaacattcacctgc

SEQ ID NO: 1125 - DNA, 20 bp, Artificial Sequence
  Description of Artificial Sequence: Synthetic oligonucleotide
aaacattcacctgctggtgg

SEQ ID NO: 1126 - DNA, 20 bp, Artificial Sequence
  Description of Artificial Sequence: Synthetic oligonucleotide
attatctaatggacgacccc

SEQ ID NO: 1127 - DNA, 20 bp, Artificial Sequence
  Description of Artificial Sequence: Synthetic oligonucleotide
aaagagcatgatcacatgct

SEQ ID NO: 1128 - DNA, 20 bp, Artificial Sequence
  Description of Artificial Sequence: Synthetic oligonucleotide
ggcaggagcacaacgacaga

SEQ ID NO: 1129 - DNA, 20 bp, Artificial Sequence
  Description of Artificial Sequence: Synthetic oligonucleotide
gcttttatacccggaaggat

SEQ ID NO: 1130 - DNA, 20 bp, Artificial Sequence
  Description of Artificial Sequence: Synthetic oligonucleotide
accccagggtaactcccggc

SEQ ID NO: 1131 - DNA, 20 bp, Artificial Sequence
  Description of Artificial Sequence: Synthetic oligonucleotide
ccaggttcatagctgcgctg

SEQ ID NO: 1132 - DNA, 20 bp, Artificial Sequence
  Description of Artificial Sequence: Synthetic oligonucleotide
ctgtgccggaagtactacct

SEQ ID NO: 1133 - DNA, 20 bp, Artificial Sequence
  Description of Artificial Sequence: Synthetic oligonucleotide
atgttgaccaaccagagaaa

SEQ ID NO: 1134 - DNA, 20 bp, Artificial Sequence
  Description of Artificial Sequence: Synthetic oligonucleotide
gatttggctctgttctgtgt

SEQ ID NO: 1135 - DNA, 20 bp, Artificial Sequence
  Description of Artificial Sequence: Synthetic oligonucleotide
gttctgtgtaggctgggaca

SEQ ID NO: 1136 - DNA, 20 bp, Artificial Sequence
  Description of Artificial Sequence: Synthetic oligonucleotide
acagccatgtattcggctcc

SEQ ID NO: 1137 - DNA, 20 bp, Artificial Sequence
  Description of Artificial Sequence: Synthetic oligonucleotide
ggcgaaaatcgcagctgcaa

SEQ ID NO: 1138 - DNA, 20 bp, Artificial Sequence
  Description of Artificial Sequence: Synthetic oligonucleotide
tcgcagctgcaaagggcccg

SEQ ID NO: 1139 - DNA, 20 bp, Artificial Sequence
  Description of Artificial Sequence: Synthetic oligonucleotide
gatggaaccgcacagagccg

SEQ ID NO: 1140 - DNA, 20 bp, Artificial Sequence
  Description of Artificial Sequence: Synthetic oligonucleotide
tctgatactcgattgagtga

SEQ ID NO: 1141 - DNA, 20 bp, Artificial Sequence
  Description of Artificial Sequence: Synthetic oligonucleotide
gtcccggtcttgcgtgcgtg

SEQ ID NO: 1142 - DNA, 20 bp, Artificial Sequence
  Description of Artificial Sequence: Synthetic oligonucleotide
acgcgtcctcccggggctca

SEQ ID NO: 1143 - DNA, 20 bp, Artificial Sequence
  Description of Artificial Sequence: Synthetic oligonucleotide
tctcgaaggagaagccccct

SEQ ID NO: 1144 - DNA, 20 bp, Artificial Sequence
  Description of Artificial Sequence: Synthetic oligonucleotide
gggctggcttcagcatcttg

SEQ ID NO: 1145 - DNA, 20 bp, Artificial Sequence
  Description of Artificial Sequence: Synthetic oligonucleotide
tcccggtcttgcgtgcgtga

SEQ ID NO: 1146 - DNA, 20 bp, Artificial Sequence
  Description of Artificial Sequence: Synthetic oligonucleotide
ggaggcgacaagaacatagt

SEQ ID NO: 1147 - DNA, 20 bp, Artificial Sequence
  Description of Artificial Sequence: Synthetic oligonucleotide
aagatattactcctgtgtgt

SEQ ID NO: 1148 - DNA, 20 bp, Artificial Sequence
  Description of Artificial Sequence: Synthetic oligonucleotide
gccaccatggagtacctcat

SEQ ID NO: 1149 - DNA, 20 bp, Artificial Sequence
  Description of Artificial Sequence: Synthetic oligonucleotide
aggtactccatggtggcgga

SEQ ID NO: 1150 - DNA, 20 bp, Artificial Sequence
  Description of Artificial Sequence: Synthetic oligonucleotide
gataccgatgaggtactcca

SEQ ID NO: 1151 - DNA, 20 bp, Artificial Sequence
  Description of Artificial Sequence: Synthetic oligonucleotide
aaaaacccgcgctggttcac

SEQ ID NO: 1152 - DNA, 20 bp, Artificial Sequence
  Description of Artificial Sequence: Synthetic oligonucleotide
cgctaccggtgaaccagcgc

SEQ ID NO: 1153 - DNA, 20 bp, Artificial Sequence
  Description of Artificial Sequence: Synthetic oligonucleotide
tgggacaccccagcctggcg

SEQ ID NO: 1154 - DNA, 20 bp, Artificial Sequence
  Description of Artificial Sequence: Synthetic oligonucleotide
caagtccgaaaaacccgcgc

SEQ ID NO: 1155 - DNA, 20 bp, Artificial Sequence
  Description of Artificial Sequence: Synthetic oligonucleotide
gcttcatggaacaaccaccc

SEQ ID NO: 1156 - DNA, 20 bp, Artificial Sequence
  Description of Artificial Sequence: Synthetic oligonucleotide
attcttccagtccctgggtg

SEQ ID NO: 1157 - DNA, 20 bp, Artificial Sequence
  Description of Artificial Sequence: Synthetic oligonucleotide
gattccggccgctgccctcg

SEQ ID NO: 1158 - DNA, 20 bp, Artificial Sequence
  Description of Artificial Sequence: Synthetic oligonucleotide
ccccggggtaaagcgagctc

SEQ ID NO: 1159 - DNA, 20 bp, Artificial Sequence
  Description of Artificial Sequence: Synthetic oligonucleotide
acagaattcttccagtccct

SEQ ID NO: 1160 - DNA, 20 bp, Artificial Sequence
  Description of Artificial Sequence: Synthetic oligonucleotide
attccggccgctgccctcgg

SEQ ID NO: 1161 - DNA, 20 bp, Artificial Sequence
  Description of Artificial Sequence: Synthetic oligonucleotide
ccttgcagggatgctgcggg

SEQ ID NO: 1162 - DNA, 20 bp, Artificial Sequence
  Description of Artificial Sequence: Synthetic oligonucleotide
ccgcccgcagcatccctgca

SEQ ID NO: 1163 - DNA, 20 bp, Artificial Sequence
  Description of Artificial Sequence: Synthetic oligonucleotide
gcccggggtaagtccccggt

SEQ ID NO: 1164 - DNA, 20 bp, Artificial Sequence
  Description of Artificial Sequence: Synthetic oligonucleotide
gtgtggacttctcccgcccg

SEQ ID NO: 1165 - DNA, 20 bp, Artificial Sequence
  Description of Artificial Sequence: Synthetic oligonucleotide
gcgggcgggagcaccaaccg

SEQ ID NO: 1166 - DNA, 20 bp, Artificial Sequence
  Description of Artificial Sequence: Synthetic oligonucleotide
gaggttttatacgaagatga

SEQ ID NO: 1167 - DNA, 20 bp, Artificial Sequence
  Description of Artificial Sequence: Synthetic oligonucleotide
ggctataagctaacattcct

SEQ ID NO: 1168 - DNA, 20 bp, Artificial Sequence
  Description of Artificial Sequence: Synthetic oligonucleotide
aagatgaaggtttccggagt

SEQ ID NO: 1169 - DNA, 20 bp, Artificial Sequence
  Description of Artificial Sequence: Synthetic oligonucleotide
aggctgcaaactgccgactc

SEQ ID NO: 1170 - DNA, 20 bp, Artificial Sequence
  Description of Artificial Sequence: Synthetic oligonucleotide
caatgataactctgaatatg

SEQ ID NO: 1171 - DNA, 20 bp, Artificial Sequence
  Description of Artificial Sequence: Synthetic oligonucleotide
ggacgagaagccgagcggca

SEQ ID NO: 1172 - DNA, 20 bp, Artificial Sequence
  Description of Artificial Sequence: Synthetic oligonucleotide
atgccaatctcagagcttca

SEQ ID NO: 1173 - DNA, 20 bp, Artificial Sequence
  Description of Artificial Sequence: Synthetic oligonucleotide
cttctcgtccgtgccgccgg

SEQ ID NO: 1174 - DNA, 20 bp, Artificial Sequence
  Description of Artificial Sequence: Synthetic oligonucleotide
gtatcggctagtgggctccc

SEQ ID NO: 1175 - DNA, 20 bp, Artificial Sequence
  Description of Artificial Sequence: Synthetic oligonucleotide
gcttctcgtccgtgccgccg

SEQ ID NO: 1176 - DNA, 20 bp, Artificial Sequence
  Description of Artificial Sequence: Synthetic oligonucleotide
cagagactcttatttaaact

SEQ ID NO: 1177 - DNA, 20 bp, Artificial Sequence
  Description of Artificial Sequence: Synthetic oligonucleotide
gcctccagccggccgtcccg

SEQ ID NO: 1178 - DNA, 20 bp, Artificial Sequence
  Description of Artificial Sequence: Synthetic oligonucleotide
attctgtcctgtttcactga

SEQ ID NO: 1179 - DNA, 20 bp, Artificial Sequence
  Description of Artificial Sequence: Synthetic oligonucleotide
tatcacagaaacaggttaca

SEQ ID NO: 1180 - DNA, 20 bp, Artificial Sequence
  Description of Artificial Sequence: Synthetic oligonucleotide
ctggcaggaggagttgattg

SEQ ID NO: 1181 - DNA, 20 bp, Artificial Sequence
  Description of Artificial Sequence: Synthetic oligonucleotide
gggtacaatcgcacttatac

SEQ ID NO: 1182 - DNA, 20 bp, Artificial Sequence
  Description of Artificial Sequence: Synthetic oligonucleotide
tttctccatagaatcctgtc

SEQ ID NO: 1183 - DNA, 20 bp, Artificial Sequence
  Description of Artificial Sequence: Synthetic oligonucleotide
ttctccatagaatcctgtcc

SEQ ID NO: 1184 - DNA, 20 bp, Artificial Sequence
  Description of Artificial Sequence: Synthetic oligonucleotide
ccgactcccttgggtgtcaa

SEQ ID NO: 1185 - DNA, 20 bp, Artificial Sequence
  Description of Artificial Sequence: Synthetic oligonucleotide
ccatagtcagcattgtaagt

SEQ ID NO: 1186 - DNA, 20 bp, Artificial Sequence
  Description of Artificial Sequence: Synthetic oligonucleotide
gaatgcttcaagtgtgctct

SEQ ID NO: 1187 - DNA, 20 bp, Artificial Sequence
  Description of Artificial Sequence: Synthetic oligonucleotide
atttggtgtgtgattcaagt

SEQ ID NO: 1188 - DNA, 20 bp, Artificial Sequence
  Description of Artificial Sequence: Synthetic oligonucleotide
gggtactgccggctggtgaa

SEQ ID NO: 1189 - DNA, 20 bp, Artificial Sequence
  Description of Artificial Sequence: Synthetic oligonucleotide
caaatctgtagactggagac

SEQ ID NO: 1190 - DNA, 20 bp, Artificial Sequence
  Description of Artificial Sequence: Synthetic oligonucleotide
ggcgatcatactgggagatg

SEQ ID NO: 1191 - DNA, 20 bp, Artificial Sequence
  Description of Artificial Sequence: Synthetic oligonucleotide
ccgcctcgttcaggtgcagc

SEQ ID NO: 1192 - DNA, 20 bp, Artificial Sequence
  Description of Artificial Sequence: Synthetic oligonucleotide
aagatctggcggcgtgccgg

SEQ ID NO: 1193 - DNA, 20 bp, Artificial Sequence
  Description of Artificial Sequence: Synthetic oligonucleotide
tcccgggacaccatggcggg

SEQ ID NO: 1194 - DNA, 20 bp, Artificial Sequence
  Description of Artificial Sequence: Synthetic oligonucleotide
ccgacgcacagcttccgagc

SEQ ID NO: 1195 - DNA, 20 bp, Artificial Sequence
  Description of Artificial Sequence: Synthetic oligonucleotide
gggccggctgcacctgaacg

SEQ ID NO: 1196 - DNA, 20 bp, Artificial Sequence
  Description of Artificial Sequence: Synthetic oligonucleotide
cggtaaggatataacctccc

SEQ ID NO: 1197 - DNA, 20 bp, Artificial Sequence
  Description of Artificial Sequence: Synthetic oligonucleotide
acggtaaggatataacctcc

SEQ ID NO: 1198 - DNA, 20 bp, Artificial Sequence
  Description of Artificial Sequence: Synthetic oligonucleotide
cggcttgtctttgccccggg

SEQ ID NO: 1199 - DNA, 20 bp, Artificial Sequence
  Description of Artificial Sequence: Synthetic oligonucleotide
ggtaaggatataacctcccg

SEQ ID NO: 1200 - DNA, 20 bp, Artificial Sequence
  Description of Artificial Sequence: Synthetic oligonucleotide
aatcggcttgtctttgcccc

SEQ ID NO: 1201 - DNA, 20 bp, Artificial Sequence
  Description of Artificial Sequence: Synthetic oligonucleotide
gatgaattaacctcactgtt

SEQ ID NO: 1202 - DNA, 20 bp, Artificial Sequence
  Description of Artificial Sequence: Synthetic oligonucleotide
tgatgaattaacctcactgt

SEQ ID NO: 1203 - DNA, 20 bp, Artificial Sequence
  Description of Artificial Sequence: Synthetic oligonucleotide
tctaattggcctttaagtga

SEQ ID NO: 1204 - DNA, 20 bp, Artificial Sequence
  Description of Artificial Sequence: Synthetic oligonucleotide
ttgcttctttcggctatcca

SEQ ID NO: 1205 - DNA, 20 bp, Artificial Sequence
  Description of Artificial Sequence: Synthetic oligonucleotide
aaacgtttgcaaacatgtcc

SEQ ID NO: 1206 - DNA, 20 bp, Artificial Sequence
  Description of Artificial Sequence: Synthetic oligonucleotide
tggagcacatacagggagct

SEQ ID NO: 1207 - DNA, 20 bp, Artificial Sequence
  Description of Artificial Sequence: Synthetic oligonucleotide
gcagtttggctatcagcgcc

SEQ ID NO: 1208 - DNA, 20 bp, Artificial Sequence
  Description of Artificial Sequence: Synthetic oligonucleotide
ggatgtcgacctctgcctct

SEQ ID NO: 1209 - DNA, 20 bp, Artificial Sequence
  Description of Artificial Sequence: Synthetic oligonucleotide
gtatgcgagagtctgtttcc

SEQ ID NO: 1210 - DNA, 20 bp, Artificial Sequence
  Description of Artificial Sequence: Synthetic oligonucleotide
gtgttaaaggtgaaggcgtg

SEQ ID NO: 1211 - DNA, 20 bp, Artificial Sequence
  Description of Artificial Sequence: Synthetic oligonucleotide
cgggcacctcaatgggtacc

SEQ ID NO: 1212 - DNA, 20 bp, Artificial Sequence
  Description of Artificial Sequence: Synthetic oligonucleotide
ggggagagtccacccagcat

SEQ ID NO: 1213 - DNA, 20 bp, Artificial Sequence
  Description of Artificial Sequence: Synthetic oligonucleotide
gcagctcctgcccgacacct

SEQ ID NO: 1214 - DNA, 20 bp, Artificial Sequence
  Description of Artificial Sequence: Synthetic oligonucleotide
ggggggaagaagaaggcgta

SEQ ID NO: 1215 - DNA, 20 bp, Artificial Sequence
  Description of Artificial Sequence: Synthetic oligonucleotide
aaagcaaggcttgtagatgc

SEQ ID NO: 1216 - DNA, 20 bp, Artificial Sequence
  Description of Artificial Sequence: Synthetic oligonucleotide
gactcgcagtgtagaaatcc

SEQ ID NO: 1217 - DNA, 20 bp, Artificial Sequence
  Description of Artificial Sequence: Synthetic oligonucleotide
gctctcaaagcatgcttcag

SEQ ID NO: 1218 - DNA, 20 bp, Artificial Sequence
  Description of Artificial Sequence: Synthetic oligonucleotide
caaaccctgcttcgtctgcc

SEQ ID NO: 1219 - DNA, 20 bp, Artificial Sequence
  Description of Artificial Sequence: Synthetic oligonucleotide
agctttctcctggagcatgc

SEQ ID NO: 1220 - DNA, 20 bp, Artificial Sequence
  Description of Artificial Sequence: Synthetic oligonucleotide
ttgtcctggcagacgaagca

SEQ ID NO: 1221 - DNA, 20 bp, Artificial Sequence
  Description of Artificial Sequence: Synthetic oligonucleotide
ccttcccaggggcactcagg

SEQ ID NO: 1222 - DNA, 20 bp, Artificial Sequence
  Description of Artificial Sequence: Synthetic oligonucleotide
ttgtcattgcacacgaagca

SEQ ID NO: 1223 - DNA, 20 bp, Artificial Sequence
  Description of Artificial Sequence: Synthetic oligonucleotide
gccttcccaggggcactcag

SEQ ID NO: 1224 - DNA, 20 bp, Artificial Sequence
  Description of Artificial Sequence: Synthetic oligonucleotide
ctagggctcagcatctcgaa

SEQ ID NO: 1225 - DNA, 20 bp, Artificial Sequence
  Description of Artificial Sequence: Synthetic oligonucleotide
aagcatggcttgtagacccg

SEQ ID NO: 1226 - DNA, 20 bp, Artificial Sequence
  Description of Artificial Sequence: Synthetic oligonucleotide
tgcagtcagcaagagacggc

SEQ ID NO: 1227 - DNA, 20 bp, Artificial Sequence
  Description of Artificial Sequence: Synthetic oligonucleotide
aagtatacgcgggcacagcc

SEQ ID NO: 1228 - DNA, 20 bp, Artificial Sequence
  Description of Artificial Sequence: Synthetic oligonucleotide
agcagagctcccggggcttg

SEQ ID NO: 1229 - DNA, 20 bp, Artificial Sequence
  Description of Artificial Sequence: Synthetic oligonucleotide
gacgtacagcaagggcgtgc

SEQ ID NO: 1230 - DNA, 20 bp, Artificial Sequence
  Description of Artificial Sequence: Synthetic oligonucleotide
aggccaacggcagcttcgtg

SEQ ID NO: 1231 - DNA, 20 bp, Artificial Sequence
  Description of Artificial Sequence: Synthetic oligonucleotide
aaataattatccatgaggtc

SEQ ID NO: 1232 - DNA, 20 bp, Artificial Sequence
  Description of Artificial Sequence: Synthetic oligonucleotide
tcctctacctgttgtgactg

SEQ ID NO: 1233 - DNA, 20 bp, Artificial Sequence
  Description of Artificial Sequence: Synthetic oligonucleotide
cggcgaggagaacgtcccgc

SEQ ID NO: 1234 - DNA, 20 bp, Artificial Sequence
  Description of Artificial Sequence: Synthetic oligonucleotide
cccgtcaatatggcggcgat

SEQ ID NO: 1235 - DNA, 20 bp, Artificial Sequence
  Description of Artificial Sequence: Synthetic oligonucleotide
gacagttggaggctttcaga

SEQ ID NO: 1236 - DNA, 20 bp, Artificial Sequence
  Description of Artificial Sequence: Synthetic oligonucleotide
tgcagaagtagttcttgcat

SEQ ID NO: 1237 - DNA, 20 bp, Artificial Sequence
  Description of Artificial Sequence: Synthetic oligonucleotide
tgtagagataacgatcatct

SEQ ID NO: 1238 - DNA, 20 bp, Artificial Sequence
  Description of Artificial Sequence: Synthetic oligonucleotide
tttgtgccttccttactgac

SEQ ID NO: 1239 - DNA, 20 bp, Artificial Sequence
  Description of Artificial Sequence: Synthetic oligonucleotide
gaatgtgactggtggtcggt

SEQ ID NO: 1240 - DNA, 20 bp, Artificial Sequence
  Description of Artificial Sequence: Synthetic oligonucleotide
ttggatgcaatccattccat

SEQ ID NO: 1241 - DNA, 20 bp, Artificial Sequence
  Description of Artificial Sequence: Synthetic oligonucleotide
ttttggcacgtgtatgaaga

SEQ ID NO: 1242 - DNA, 20 bp, Artificial Sequence
  Description of Artificial Sequence: Synthetic oligonucleotide
gaagcctgacaacatgctct

SEQ ID NO: 1243 - DNA, 20 bp, Artificial Sequence
  Description of Artificial Sequence: Synthetic oligonucleotide
aatcagaggtctacagatga

SEQ ID NO: 1244 - DNA, 20 bp, Artificial Sequence
  Description of Artificial Sequence: Synthetic oligonucleotide
tccacgttgatgggggagcg

SEQ ID NO: 1245 - DNA, 20 bp, Artificial Sequence
  Description of Artificial Sequence: Synthetic oligonucleotide
cgcccccgagaccgcgccgg

SEQ ID NO: 1246 - DNA, 20 bp, Artificial Sequence
  Description of Artificial Sequence: Synthetic oligonucleotide
gctgggtcactttctctact

SEQ ID NO: 1247 - DNA, 20 bp, Artificial Sequence
  Description of Artificial Sequence: Synthetic oligonucleotide
gtcctgtaactgggacttgg

SEQ ID NO: 1248 - DNA, 20 bp, Artificial Sequence
  Description of Artificial Sequence: Synthetic oligonucleotide
ccctggtcagagccctcagt

SEQ ID NO: 1249 - DNA, 20 bp, Artificial Sequence
  Description of Artificial Sequence: Synthetic oligonucleotide
gtagatagtatttggtaaag

SEQ ID NO: 1250 - DNA, 20 bp, Artificial Sequence
  Description of Artificial Sequence: Synthetic oligonucleotide
cagcaaaggggatgcgaggt

SEQ ID NO: 1251 - DNA, 20 bp, Artificial Sequence
  Description of Artificial Sequence: Synthetic oligonucleotide
atcacgccatcaaatcccgc

SEQ ID NO: 1252 - DNA, 20 bp, Artificial Sequence
  Description of Artificial Sequence: Synthetic oligonucleotide
ccaccgaggcctgcgcaagg

SEQ ID NO: 1253 - DNA, 20 bp, Artificial Sequence
  Description of Artificial Sequence: Synthetic oligonucleotide
acagagaaggctacacgagc

SEQ ID NO: 1254 - DNA, 20 bp, Artificial Sequence
  Description of Artificial Sequence: Synthetic oligonucleotide
catgggtggtgtctctacaa

SEQ ID NO: 1255 - DNA, 20 bp, Artificial Sequence
  Description of Artificial Sequence: Synthetic oligonucleotide
tgagatgatcgacgtcatcg

SEQ ID NO: 1256 - DNA, 20 bp, Artificial Sequence
  Description of Artificial Sequence: Synthetic oligonucleotide
catgaggcgacgaaggaggc

SEQ ID NO: 1257 - DNA, 20 bp, Artificial Sequence
  Description of Artificial Sequence: Synthetic oligonucleotide
taaatgaaagcatggaccat

SEQ ID NO: 1258 - DNA, 20 bp, Artificial Sequence
  Description of Artificial Sequence: Synthetic oligonucleotide
gcggcgggtccgggcccatg

SEQ ID NO: 1259 - DNA, 20 bp, Artificial Sequence
  Description of Artificial Sequence: Synthetic oligonucleotide
aagtaacaggagcaaatact

SEQ ID NO: 1260 - DNA, 20 bp, Artificial Sequence
  Description of Artificial Sequence: Synthetic oligonucleotide
aggcgacgaaggaggcggga

SEQ ID NO: 1261 - DNA, 20 bp, Artificial Sequence
  Description of Artificial Sequence: Synthetic oligonucleotide
aggcactgtgagaaaattga

SEQ ID NO: 1262 - DNA, 20 bp, Artificial Sequence
  Description of Artificial Sequence: Synthetic oligonucleotide
ataggtcagccgggaggtcg

SEQ ID NO: 1263 - DNA, 20 bp, Artificial Sequence
  Description of Artificial Sequence: Synthetic oligonucleotide
cttctgtaaatttgcaccga

SEQ ID NO: 1264 - DNA, 20 bp, Artificial Sequence
  Description of Artificial Sequence: Synthetic oligonucleotide
ggggatcatgggcagcagct

SEQ ID NO: 1265 - DNA, 20 bp, Artificial Sequence
  Description of Artificial Sequence: Synthetic oligonucleotide
gatgggtcctcagaaagctc

SEQ ID NO: 1266 - DNA, 20 bp, Artificial Sequence
  Description of Artificial Sequence: Synthetic oligonucleotide
gtgagttgtattcgggctac

SEQ ID NO: 1267 - DNA, 20 bp, Artificial Sequence
  Description of Artificial Sequence: Synthetic oligonucleotide
aatgttgacttggccaccat

SEQ ID NO: 1268 - DNA, 20 bp, Artificial Sequence
  Description of Artificial Sequence: Synthetic oligonucleotide
caatgttgacttggccacca

SEQ ID NO: 1269 - DNA, 20 bp, Artificial Sequence
  Description of Artificial Sequence: Synthetic oligonucleotide
acagctcgatatgtggatca

SEQ ID NO: 1270 - DNA, 20 bp, Artificial Sequence
  Description of Artificial Sequence: Synthetic oligonucleotide
ctcgatatgtggatcaaggt

SEQ ID NO: 1271 - DNA, 20 bp, Artificial Sequence
  Description of Artificial Sequence: Synthetic oligonucleotide
cagggacgggtgcagcgagg

SEQ ID NO: 1272 - DNA, 20 bp, Artificial Sequence
  Description of Artificial Sequence: Synthetic oligonucleotide
ggagccgatgccaggcccca

SEQ ID NO: 1273 - DNA, 20 bp, Artificial Sequence
  Description of Artificial Sequence: Synthetic oligonucleotide
cctcgctgcacccgtccctg

SEQ ID NO: 1274 - DNA, 20 bp, Artificial Sequence
  Description of Artificial Sequence: Synthetic oligonucleotide
aggaagccatgtttcctgag

SEQ ID NO: 1275 - DNA, 20 bp, Artificial Sequence
  Description of Artificial Sequence: Synthetic oligonucleotide
tggcgcccacccctgcgctg

SEQ ID NO: 1276 - DNA, 20 bp, Artificial Sequence
  Description of Artificial Sequence: Synthetic oligonucleotide
atttcttttcgcacccccac

SEQ ID NO: 1277 - DNA, 20 bp, Artificial Sequence
  Description of Artificial Sequence: Synthetic oligonucleotide
cccatggaagaactgatgac

SEQ ID NO: 1278 - DNA, 20 bp, Artificial Sequence
  Description of Artificial Sequence: Synthetic oligonucleotide
aggccccggacccctaagac

SEQ ID NO: 1279 - DNA, 20 bp, Artificial Sequence
  Description of Artificial Sequence: Synthetic oligonucleotide
ctcccctggctccggctccg

SEQ ID NO: 1280 - DNA, 20 bp, Artificial Sequence
  Description of Artificial Sequence: Synthetic oligonucleotide
cctggccactggcatgaaga

SEQ ID NO: 1281 - DNA, 20 bp, Artificial Sequence
  Description of Artificial Sequence: Synthetic oligonucleotide
tttccaatcccgggaagccc

SEQ ID NO: 1282 - DNA, 20 bp, Artificial Sequence
  Description of Artificial Sequence: Synthetic oligonucleotide
ctgcaagtgctcctgagggt

SEQ ID NO: 1283 - DNA, 20 bp, Artificial Sequence
  Description of Artificial Sequence: Synthetic oligonucleotide
ctgtggacaaggctgctgat

SEQ ID NO: 1284 - DNA, 20 bp, Artificial Sequence
  Description of Artificial Sequence: Synthetic oligonucleotide
ccctcttcatgcccatgaca

SEQ ID NO: 1285 - DNA, 20 bp, Artificial Sequence
  Description of Artificial Sequence: Synthetic oligonucleotide
gagagcccagggcattgagg

SEQ ID NO: 1286 - DNA, 20 bp, Artificial Sequence
  Description of Artificial Sequence: Synthetic oligonucleotide
caataaaatagtacatgggt

SEQ ID NO: 1287 - DNA, 20 bp, Artificial Sequence
  Description of Artificial Sequence: Synthetic oligonucleotide
taaaatagtacatgggtcgg

SEQ ID NO: 1288 - DNA, 20 bp, Artificial Sequence
  Description of Artificial Sequence: Synthetic oligonucleotide
cgtccggcattacaactaca

SEQ ID NO: 1289 - DNA, 20 bp, Artificial Sequence
  Description of Artificial Sequence: Synthetic oligonucleotide
gtccggcattacaactacac

SEQ ID NO: 1290 - DNA, 20 bp, Artificial Sequence
  Description of Artificial Sequence: Synthetic oligonucleotide
ttgccaataaaatagtacat

SEQ ID NO: 1291 - DNA, 20 bp, Artificial Sequence
  Description of Artificial Sequence: Synthetic oligonucleotide
gctccagcatccaggaggtc

SEQ ID NO: 1292 - DNA, 20 bp, Artificial Sequence
  Description of Artificial Sequence: Synthetic oligonucleotide
ctcggccggggagctgccag

SEQ ID NO: 1293 - DNA, 20 bp, Artificial Sequence
  Description of Artificial Sequence: Synthetic oligonucleotide
gtgtcccggtagtcgcggcc

SEQ ID NO: 1294 - DNA, 20 bp, Artificial Sequence
  Description of Artificial Sequence: Synthetic oligonucleotide
ctggcagctccccggccgag

SEQ ID NO: 1295 - DNA, 20 bp, Artificial Sequence
  Description of Artificial Sequence: Synthetic oligonucleotide
ctgtgagttgcacgccgtag

SEQ ID NO: 1296 - DNA, 20 bp, Artificial Sequence
  Description of Artificial Sequence: Synthetic oligonucleotide
aagaaaacaccggagcggac

SEQ ID NO: 1297 - DNA, 20 bp, Artificial Sequence
  Description of Artificial Sequence: Synthetic oligonucleotide
agaccctaggcgccagcgga

SEQ ID NO: 1298 - DNA, 20 bp, Artificial Sequence
  Description of Artificial Sequence: Synthetic oligonucleotide
ggtgagttccttaaatcgct

SEQ ID NO: 1299 - DNA, 20 bp, Artificial Sequence
  Description of Artificial Sequence: Synthetic oligonucleotide
gtatgctcgggactggcgtg

SEQ ID NO: 1300 - DNA, 20 bp, Artificial Sequence
  Description of Artificial Sequence: Synthetic oligonucleotide
ggatgaagaaaacaccggag

SEQ ID NO: 1301 - DNA, 20 bp, Artificial Sequence
  Description of Artificial Sequence: Synthetic oligonucleotide
tggcgggggcctggcacacc

SEQ ID NO: 1302 - DNA, 20 bp, Artificial Sequence
  Description of Artificial Sequence: Synthetic oligonucleotide
gtgccaggcccccgccagcc

SEQ ID NO: 1303 - DNA, 20 bp, Artificial Sequence
  Description of Artificial Sequence: Synthetic oligonucleotide
caggagagcctctgtccacg

SEQ ID NO: 1304 - DNA, 20 bp, Artificial Sequence
  Description of Artificial Sequence: Synthetic oligonucleotide
cccctcaaagacttccgggg

SEQ ID NO: 1305 - DNA, 20 bp, Artificial Sequence
  Description of Artificial Sequence: Synthetic oligonucleotide
agtcgtctccccctccacca

SEQ ID NO: 1306 - DNA, 20 bp, Artificial Sequence
  Description of Artificial Sequence: Synthetic oligonucleotide
cgcaagaggccgcggagaga

SEQ ID NO: 1307 - DNA, 20 bp, Artificial Sequence
  Description of Artificial Sequence: Synthetic oligonucleotide
tgtcggcccccgccgccgag

SEQ ID NO: 1308 - DNA, 20 bp, Artificial Sequence
  Description of Artificial Sequence: Synthetic oligonucleotide
cacatgcaagctctagtgac

SEQ ID NO: 1309 - DNA, 20 bp, Artificial Sequence
  Description of Artificial Sequence: Synthetic oligonucleotide
ggccgcgtcgtcccccgccg

SEQ ID NO: 1310 - DNA, 20 bp, Artificial Sequence
  Description of Artificial Sequence: Synthetic oligonucleotide
tggggcggccccagagcgtg

SEQ ID NO: 1311 - DNA, 20 bp, Artificial Sequence
  Description of Artificial Sequence: Synthetic oligonucleotide
gaaccagccatattgctctc

SEQ ID NO: 1312 - DNA, 20 bp, Artificial Sequence
  Description of Artificial Sequence: Synthetic oligonucleotide
gctggtcggttccgttggtg

SEQ ID NO: 1313 - DNA, 20 bp, Artificial Sequence
  Description of Artificial Sequence: Synthetic oligonucleotide
tatatcctttggcagctcac

SEQ ID NO: 1314 - DNA, 20 bp, Artificial Sequence
  Description of Artificial Sequence: Synthetic oligonucleotide
cttccagagagcaatatggc

SEQ ID NO: 1315 - DNA, 20 bp, Artificial Sequence
  Description of Artificial Sequence: Synthetic oligonucleotide
gctttactttggacttcagg

SEQ ID NO: 1316 - DNA, 20 bp, Artificial Sequence
  Description of Artificial Sequence: Synthetic oligonucleotide
ctcaactaatcaccatgctc

SEQ ID NO: 1317 - DNA, 20 bp, Artificial Sequence
  Description of Artificial Sequence: Synthetic oligonucleotide
ggcctggttcctatgtatat

SEQ ID NO: 1318 - DNA, 20 bp, Artificial Sequence
  Description of Artificial Sequence: Synthetic oligonucleotide
cagtctcttcctcagcccaa

SEQ ID NO: 1319 - DNA, 20 bp, Artificial Sequence
  Description of Artificial Sequence: Synthetic oligonucleotide
gttcattgagtatgagattg

SEQ ID NO: 1320 - DNA, 20 bp, Artificial Sequence
  Description of Artificial Sequence: Synthetic oligonucleotide
ctgcaaagctggatacagac

SEQ ID NO: 1321 - DNA, 20 bp, Artificial Sequence
  Description of Artificial Sequence: Synthetic oligonucleotide
gcccctgtgccatcgtggag

SEQ ID NO: 1322 - DNA, 20 bp, Artificial Sequence
  Description of Artificial Sequence: Synthetic oligonucleotide
ccgctgcccgcccagcgcgg

SEQ ID NO: 1323 - DNA, 20 bp, Artificial Sequence
  Description of Artificial Sequence: Synthetic oligonucleotide
tggctggcccagttcatgga

SEQ ID NO: 1324 - DNA, 20 bp, Artificial Sequence
  Description of Artificial Sequence: Synthetic oligonucleotide
cccctgtgccatcgtggaga

SEQ ID NO: 1325 - DNA, 20 bp, Artificial Sequence
  Description of Artificial Sequence: Synthetic oligonucleotide
agcagcggggggcattccgg

SEQ ID NO: 1326 - DNA, 20 bp, Artificial Sequence
  Description of Artificial Sequence: Synthetic oligonucleotide
cgtcacctccccgcagaggg

SEQ ID NO: 1327 - DNA, 20 bp, Artificial Sequence
  Description of Artificial Sequence: Synthetic oligonucleotide
ggcgccctccgactccatcc

SEQ ID NO: 1328 - DNA, 20 bp, Artificial Sequence
  Description of Artificial Sequence: Synthetic oligonucleotide
cagcgggcccgccctctgcg

SEQ ID NO: 1329 - DNA, 20 bp, Artificial Sequence
  Description of Artificial Sequence: Synthetic oligonucleotide
ctggcccactcgctcagcac

SEQ ID NO: 1330 - DNA, 20 bp, Artificial Sequence
  Description of Artificial Sequence: Synthetic oligonucleotide
tcctagactcatagtcatag

SEQ ID NO: 1331 - DNA, 20 bp, Artificial Sequence
  Description of Artificial Sequence: Synthetic oligonucleotide
ttgacaccacagagccattg

SEQ ID NO: 1332 - DNA, 20 bp, Artificial Sequence
  Description of Artificial Sequence: Synthetic oligonucleotide
ttgcttgtcaggtcatagta

SEQ ID NO: 1333 - DNA, 20 bp, Artificial Sequence
  Description of Artificial Sequence: Synthetic oligonucleotide
atttgacctcaatggctctg

SEQ ID NO: 1334 - DNA, 20 bp, Artificial Sequence
  Description of Artificial Sequence: Synthetic oligonucleotide
cactcaatggaagccacaca

SEQ ID NO: 1335 - DNA, 20 bp, Artificial Sequence
  Description of Artificial Sequence: Synthetic oligonucleotide
aaaagcagccatggacatgg

SEQ ID NO: 1336 - DNA, 20 bp, Artificial Sequence
  Description of Artificial Sequence: Synthetic oligonucleotide
gctggaacgcctcctccccg

SEQ ID NO: 1337 - DNA, 20 bp, Artificial Sequence
  Description of Artificial Sequence: Synthetic oligonucleotide
gcctccagaggcagcccccg

SEQ ID NO: 1338 - DNA, 20 bp, Artificial Sequence
  Description of Artificial Sequence: Synthetic oligonucleotide
aggcggtgacaacaggacgc

SEQ ID NO: 1339 - DNA, 20 bp, Artificial Sequence
  Description of Artificial Sequence: Synthetic oligonucleotide
gctgtacctgctggtgtgtg

SEQ ID NO: 1340 - DNA, 20 bp, Artificial Sequence
  Description of Artificial Sequence: Synthetic oligonucleotide
ctggaacgcctcctccccgg

SEQ ID NO: 1341 - DNA, 20 bp, Artificial Sequence
  Description of Artificial Sequence: Synthetic oligonucleotide
ctgctgtagctgattccatt

SEQ ID NO: 1342 - DNA, 20 bp, Artificial Sequence
  Description of Artificial Sequence: Synthetic oligonucleotide
gaaactgccgcagctccatt

SEQ ID NO: 1343 - DNA, 20 bp, Artificial Sequence
  Description of Artificial Sequence: Synthetic oligonucleotide
agccgatctaggcagatgtt

SEQ ID NO: 1344 - DNA, 20 bp, Artificial Sequence
  Description of Artificial Sequence: Synthetic oligonucleotide
tccagttcactactaaagtc

SEQ ID NO: 1345 - DNA, 20 bp, Artificial Sequence
  Description of Artificial Sequence: Synthetic oligonucleotide
gacccctgattttagcagga

SEQ ID NO: 1346 - DNA, 20 bp, Artificial Sequence
  Description of Artificial Sequence: Synthetic oligonucleotide
cccttcgtgcagcaggcaca

SEQ ID NO: 1347 - DNA, 20 bp, Artificial Sequence
  Description of Artificial Sequence: Synthetic oligonucleotide
agccgttgttgtctctggct

SEQ ID NO: 1348 - DNA, 20 bp, Artificial Sequence
  Description of Artificial Sequence: Synthetic oligonucleotide
gccatgcttcaggggccgga

SEQ ID NO: 1349 - DNA, 20 bp, Artificial Sequence
  Description of Artificial Sequence: Synthetic oligonucleotide
cagaagattacctggtccag

SEQ ID NO: 1350 - DNA, 20 bp, Artificial Sequence
  Description of Artificial Sequence: Synthetic oligonucleotide
ggttccatggaaaaatctct

SEQ ID NO: 1351 - DNA, 20 bp, Artificial Sequence
  Description of Artificial Sequence: Synthetic oligonucleotide
atgtctccactccagtcaat

SEQ ID NO: 1352 - DNA, 20 bp, Artificial Sequence
  Description of Artificial Sequence: Synthetic oligonucleotide
caaattatttgctattgaag

SEQ ID NO: 1353 - DNA, 20 bp, Artificial Sequence
  Description of Artificial Sequence: Synthetic oligonucleotide
cgacgcttagtcttagaacc

SEQ ID NO: 1354 - DNA, 20 bp, Artificial Sequence
  Description of Artificial Sequence: Synthetic oligonucleotide
atcaagaacttatctacgaa

SEQ ID NO: 1355 - DNA, 20 bp, Artificial Sequence
  Description of Artificial Sequence: Synthetic oligonucleotide
atgcgtgttataggggaaga

SEQ ID NO: 1356 - DNA, 20 bp, Artificial Sequence
  Description of Artificial Sequence: Synthetic oligonucleotide
aggggggaggatccggtgga

SEQ ID NO: 1357 - DNA, 20 bp, Artificial Sequence
  Description of Artificial Sequence: Synthetic oligonucleotide
tcttcacctcggccttcacc

SEQ ID NO: 1358 - DNA, 20 bp, Artificial Sequence
  Description of Artificial Sequence: Synthetic oligonucleotide
acagtcatagttaaagtagc

SEQ ID NO: 1359 - DNA, 20 bp, Artificial Sequence
  Description of Artificial Sequence: Synthetic oligonucleotide
atgctggagtgtactcggcc

SEQ ID NO: 1360 - DNA, 20 bp, Artificial Sequence
  Description of Artificial Sequence: Synthetic oligonucleotide
ctggagagcagagacatcct

SEQ ID NO: 1361 - DNA, 20 bp, Artificial Sequence
  Description of Artificial Sequence: Synthetic oligonucleotide
cgaagaagccacctctttgg

SEQ ID NO: 1362 - DNA, 20 bp, Artificial Sequence
  Description of Artificial Sequence: Synthetic oligonucleotide
cccgcgcctcctcgcacccg

SEQ ID NO: 1363 - DNA, 20 bp, Artificial Sequence
  Description of Artificial Sequence: Synthetic oligonucleotide
ctggcggctggtgcagcgcg

SEQ ID NO: 1364 - DNA, 20 bp, Artificial Sequence
  Description of Artificial Sequence: Synthetic oligonucleotide
agcagccggtgtctgtgccc

SEQ ID NO: 1365 - DNA, 20 bp, Artificial Sequence
  Description of Artificial Sequence: Synthetic oligonucleotide
ggtccactagcgtgtggcgg

SEQ ID NO: 1366 - DNA, 20 bp, Artificial Sequence
  Description of Artificial Sequence: Synthetic oligonucleotide
tggatagtcccgcggccggc

SEQ ID NO: 1367 - DNA, 20 bp, Artificial Sequence
  Description of Artificial Sequence: Synthetic oligonucleotide
tggttatcttttgatgtcac

SEQ ID NO: 1368 - DNA, 20 bp, Artificial Sequence
  Description of Artificial Sequence: Synthetic oligonucleotide
tcaccggagttgtgcggcag

SEQ ID NO: 1369 - DNA, 20 bp, Artificial Sequence
  Description of Artificial Sequence: Synthetic oligonucleotide
tactggtgctgacgcctggc

SEQ ID NO: 1370 - DNA, 20 bp, Artificial Sequence
  Description of Artificial Sequence: Synthetic oligonucleotide
caaccactgccgcacaactc

SEQ ID NO: 1371 - DNA, 20 bp, Artificial Sequence
  Description of Artificial Sequence: Synthetic oligonucleotide
gttacgtcatgaaaacatcc

SEQ ID NO: 1372 - DNA, 20 bp, Artificial Sequence
  Description of Artificial Sequence: Synthetic oligonucleotide
cctcttcatttggcactcga

SEQ ID NO: 1373 - DNA, 20 bp, Artificial Sequence
  Description of Artificial Sequence: Synthetic oligonucleotide
gtttggagaggaaagtggcg

SEQ ID NO: 1374 - DNA, 20 bp, Artificial Sequence
  Description of Artificial Sequence: Synthetic oligonucleotide
tgtctgctgctataaatccc

SEQ ID NO: 1375 - DNA, 20 bp, Artificial Sequence
  Description of Artificial Sequence: Synthetic oligonucleotide
ttacgtcatgaaaacatcct

SEQ ID NO: 1376 - DNA, 20 bp, Artificial Sequence
  Description of Artificial Sequence: Synthetic oligonucleotide
cggccatcaaaggagcagga

SEQ ID NO: 1377 - DNA, 20 bp, Artificial Sequence
  Description of Artificial Sequence: Synthetic oligonucleotide
atgagctcgagcccctacaa

SEQ ID NO: 1378 - DNA, 20 bp, Artificial Sequence
  Description of Artificial Sequence: Synthetic oligonucleotide
cctccttgtcaatagtcaag

SEQ ID NO: 1379 - DNA, 20 bp, Artificial Sequence
  Description of Artificial Sequence: Synthetic oligonucleotide
ctccttgtcaatagtcaagg

SEQ ID NO: 1380 - DNA, 20 bp, Artificial Sequence
  Description of Artificial Sequence: Synthetic oligonucleotide
tatacaagctattagctgcg

SEQ ID NO: 1381 - DNA, 20 bp, Artificial Sequence
  Description of Artificial Sequence: Synthetic oligonucleotide
atgttcttaaaccatcttgg

SEQ ID NO: 1382 - DNA, 20 bp, Artificial Sequence
  Description of Artificial Sequence: Synthetic oligonucleotide
acatccagagtgacatcaca

SEQ ID NO: 1383 - DNA, 20 bp, Artificial Sequence
  Description of Artificial Sequence: Synthetic oligonucleotide
cagtctgtgaaaggacgctg

SEQ ID NO: 1384 - DNA, 20 bp, Artificial Sequence
  Description of Artificial Sequence: Synthetic oligonucleotide
cagctactagagataccgca

SEQ ID NO: 1385 - DNA, 20 bp, Artificial Sequence
  Description of Artificial Sequence: Synthetic oligonucleotide
actgtgtacctattccactg

SEQ ID NO: 1386 - DNA, 20 bp, Artificial Sequence
  Description of Artificial Sequence: Synthetic oligonucleotide
caaaatagctcctgcagcct

SEQ ID NO: 1387 - DNA, 20 bp, Artificial Sequence
  Description of Artificial Sequence: Synthetic oligonucleotide
attgaagcaccaccatcaca

SEQ ID NO: 1388 - DNA, 20 bp, Artificial Sequence
  Description of Artificial Sequence: Synthetic oligonucleotide
aaagactctggcaaaccaga

SEQ ID NO: 1389 - DNA, 20 bp, Artificial Sequence
  Description of Artificial Sequence: Synthetic oligonucleotide
acaaggcacgcatggaaatg

SEQ ID NO: 1390 - DNA, 20 bp, Artificial Sequence
  Description of Artificial Sequence: Synthetic oligonucleotide
aagtcaagtatttctaagcg

SEQ ID NO: 1391 - DNA, 20 bp, Artificial Sequence
  Description of Artificial Sequence: Synthetic oligonucleotide
tggagtgatcggcccccaga

SEQ ID NO: 1392 - DNA, 20 bp, Artificial Sequence
  Description of Artificial Sequence: Synthetic oligonucleotide
gctcatggtgtcctttccag

SEQ ID NO: 1393 - DNA, 20 bp, Artificial Sequence
  Description of Artificial Sequence: Synthetic oligonucleotide
aagcaccgcctggagccctg

SEQ ID NO: 1394 - DNA, 20 bp, Artificial Sequence
  Description of Artificial Sequence: Synthetic oligonucleotide
ttggagtgatcggcccccag

SEQ ID NO: 1395 - DNA, 20 bp, Artificial Sequence
  Description of Artificial Sequence: Synthetic oligonucleotide
tgggctacaggcttgtcact

SEQ ID NO: 1396 - DNA, 20 bp, Artificial Sequence
  Description of Artificial Sequence: Synthetic oligonucleotide
tagaagcagcttcctgggcg

SEQ ID NO: 1397 - DNA, 20 bp, Artificial Sequence
  Description of Artificial Sequence: Synthetic oligonucleotide
actactatgacaaggctgtc

SEQ ID NO: 1398 - DNA, 20 bp, Artificial Sequence
  Description of Artificial Sequence: Synthetic oligonucleotide
gcctcatccaggtagtagtc

SEQ ID NO: 1399 - DNA, 20 bp, Artificial Sequence
  Description of Artificial Sequence: Synthetic oligonucleotide
ccagcaccatgcctgtaaga

SEQ ID NO: 1400 - DNA, 20 bp, Artificial Sequence
  Description of Artificial Sequence: Synthetic oligonucleotide
tctgtgagccggcttcccca

SEQ ID NO: 1401 - DNA, 20 bp, Artificial Sequence
  Description of Artificial Sequence: Synthetic oligonucleotide
ctgcgtggctcggaggagat

SEQ ID NO: 1402 - DNA, 20 bp, Artificial Sequence
  Description of Artificial Sequence: Synthetic oligonucleotide
ggccacgaacatggagcggg

SEQ ID NO: 1403 - DNA, 20 bp, Artificial Sequence
  Description of Artificial Sequence: Synthetic oligonucleotide
cctaatagaatatcagaaga

SEQ ID NO: 1404 - DNA, 20 bp, Artificial Sequence
  Description of Artificial Sequence: Synthetic oligonucleotide
aattaatacctgattcatgt

SEQ ID NO: 1405 - DNA, 20 bp, Artificial Sequence
  Description of Artificial Sequence: Synthetic oligonucleotide
gactacaccaagtacctgcg

SEQ ID NO: 1406 - DNA, 20 bp, Artificial Sequence
  Description of Artificial Sequence: Synthetic oligonucleotide
gctttccgtctttggaggat

SEQ ID NO: 1407 - DNA, 20 bp, Artificial Sequence
  Description of Artificial Sequence: Synthetic oligonucleotide
gaagctccagctgtcaccgc

SEQ ID NO: 1408 - DNA, 20 bp, Artificial Sequence
  Description of Artificial Sequence: Synthetic oligonucleotide
tctttggaggatcggacaga

SEQ ID NO: 1409 - DNA, 20 bp, Artificial Sequence
  Description of Artificial Sequence: Synthetic oligonucleotide
tgtttcttctggaccctgaa

SEQ ID NO: 1410 - DNA, 20 bp, Artificial Sequence
  Description of Artificial Sequence: Synthetic oligonucleotide
gtctttggaggatcggacag

SEQ ID NO: 1411 - DNA, 20 bp, Artificial Sequence
  Description of Artificial Sequence: Synthetic oligonucleotide
cagcgctaggccgtgccgcg

SEQ ID NO: 1412 - DNA, 20 bp, Artificial Sequence
  Description of Artificial Sequence: Synthetic oligonucleotide
cccttcgcctccccgcggca

SEQ ID NO: 1413 - DNA, 20 bp, Artificial Sequence
  Description of Artificial Sequence: Synthetic oligonucleotide
acggcctagcgctgccggag

SEQ ID NO: 1414 - DNA, 20 bp, Artificial Sequence
  Description of Artificial Sequence: Synthetic oligonucleotide
gtaactcagcaggaggcggc

SEQ ID NO: 1415 - DNA, 20 bp, Artificial Sequence
  Description of Artificial Sequence: Synthetic oligonucleotide
tcccgactgccatccccctc

SEQ ID NO: 1416 - DNA, 20 bp, Artificial Sequence
  Description of Artificial Sequence: Synthetic oligonucleotide
cccactcatgtcggcccgga

SEQ ID NO: 1417 - DNA, 20 bp, Artificial Sequence
  Description of Artificial Sequence: Synthetic oligonucleotide
ggtccccactcatgtcggcc

SEQ ID NO: 1418 - DNA, 20 bp, Artificial Sequence
  Description of Artificial Sequence: Synthetic oligonucleotide
tagctacttcctctgctttg

SEQ ID NO: 1419 - DNA, 20 bp, Artificial Sequence
  Description of Artificial Sequence: Synthetic oligonucleotide
ccccactcatgtcggcccgg

SEQ ID NO: 1420 - DNA, 20 bp, Artificial Sequence
  Description of Artificial Sequence: Synthetic oligonucleotide
gaagaagagcgctatcctga

SEQ ID NO: 1421 - DNA, 20 bp, Artificial Sequence
  Description of Artificial Sequence: Synthetic oligonucleotide
gggctcgcgcaggacgcaga

SEQ ID NO: 1422 - DNA, 20 bp, Artificial Sequence
  Description of Artificial Sequence: Synthetic oligonucleotide
cgataacaccgtcacgtggc

SEQ ID NO: 1423 - DNA, 20 bp, Artificial Sequence
  Description of Artificial Sequence: Synthetic oligonucleotide
cgtggcgaccatcccaagat

SEQ ID NO: 1424 - DNA, 20 bp, Artificial Sequence
  Description of Artificial Sequence: Synthetic oligonucleotide
gccggcggggcaccagtgga

SEQ ID NO: 1425 - DNA, 20 bp, Artificial Sequence
  Description of Artificial Sequence: Synthetic oligonucleotide
ccacggccacggaacaagcc

SEQ ID NO: 1426 - DNA, 20 bp, Artificial Sequence
  Description of Artificial Sequence: Synthetic oligonucleotide
gataatgattatgacagatc

SEQ ID NO: 1427 - DNA, 20 bp, Artificial Sequence
  Description of Artificial Sequence: Synthetic oligonucleotide
ctccgcccagacacctacat

SEQ ID NO: 1428 - DNA, 20 bp, Artificial Sequence
  Description of Artificial Sequence: Synthetic oligonucleotide
cagaaccaatgtaggtgtct

SEQ ID NO: 1429 - DNA, 20 bp, Artificial Sequence
  Description of Artificial Sequence: Synthetic oligonucleotide
tttgggcaccagcacatcaa

SEQ ID NO: 1430 - DNA, 20 bp, Artificial Sequence
  Description of Artificial Sequence: Synthetic oligonucleotide
agacacctacattggttctg

SEQ ID NO: 1431 - DNA, 20 bp, Artificial Sequence
  Description of Artificial Sequence: Synthetic oligonucleotide
cggcgtgggcggcggcaacg

SEQ ID NO: 1432 - DNA, 20 bp, Artificial Sequence
  Description of Artificial Sequence: Synthetic oligonucleotide
cggagacagcgtaggctaca

SEQ ID NO: 1433 - DNA, 20 bp, Artificial Sequence
  Description of Artificial Sequence: Synthetic oligonucleotide
cataatctttccatagcgta

SEQ ID NO: 1434 - DNA, 20 bp, Artificial Sequence
  Description of Artificial Sequence: Synthetic oligonucleotide
catgtagcctacgctgtctc

SEQ ID NO: 1435 - DNA, 20 bp, Artificial Sequence
  Description of Artificial Sequence: Synthetic oligonucleotide
gatttggctggttcgtgtag

SEQ ID NO: 1436 - DNA, 20 bp, Artificial Sequence
  Description of Artificial Sequence: Synthetic oligonucleotide
tgcctgtgataagttgctca

SEQ ID NO: 1437 - DNA, 20 bp, Artificial Sequence
  Description of Artificial Sequence: Synthetic oligonucleotide
caccttcttcagtgagacgg

SEQ ID NO: 1438 - DNA, 20 bp, Artificial Sequence
  Description of Artificial Sequence: Synthetic oligonucleotide
acaccttcttcagtgagacg

SEQ ID NO: 1439 - DNA, 20 bp, Artificial Sequence
  Description of Artificial Sequence: Synthetic oligonucleotide
caccctgagcaacttatcac

SEQ ID NO: 1440 - DNA, 20 bp, Artificial Sequence
  Description of Artificial Sequence: Synthetic oligonucleotide
ggagatcattgacctcgtgt

SEQ ID NO: 1441 - DNA, 20 bp, Artificial Sequence
  Description of Artificial Sequence: Synthetic oligonucleotide
gagctctattgcttggaaca

SEQ ID NO: 1442 - DNA, 20 bp, Artificial Sequence
  Description of Artificial Sequence: Synthetic oligonucleotide
cagatccacaaaaactgccc

SEQ ID NO: 1443 - DNA, 20 bp, Artificial Sequence
  Description of Artificial Sequence: Synthetic oligonucleotide
gtgctggaaaacacgtaccc

SEQ ID NO: 1444 - DNA, 20 bp, Artificial Sequence
  Description of Artificial Sequence: Synthetic oligonucleotide
ctgctgggagctctattgct

SEQ ID NO: 1445 - DNA, 20 bp, Artificial Sequence
  Description of Artificial Sequence: Synthetic oligonucleotide
acccagagcagctcatcact

SEQ ID NO: 1446 - DNA, 20 bp, Artificial Sequence
  Description of Artificial Sequence: Synthetic oligonucleotide
atatgttcctcgtgccatcc

SEQ ID NO: 1447 - DNA, 20 bp, Artificial Sequence
  Description of Artificial Sequence: Synthetic oligonucleotide
cattgtagtacacagagatg

SEQ ID NO: 1448 - DNA, 20 bp, Artificial Sequence
  Description of Artificial Sequence: Synthetic oligonucleotide
tgttcctcgtgccatcctgg

SEQ ID NO: 1449 - DNA, 20 bp, Artificial Sequence
  Description of Artificial Sequence: Synthetic oligonucleotide
aggttctagatccaccagga

SEQ ID NO: 1450 - DNA, 20 bp, Artificial Sequence
  Description of Artificial Sequence: Synthetic oligonucleotide
agatccaccaggatggcacg

SEQ ID NO: 1451 - DNA, 20 bp, Artificial Sequence
  Description of Artificial Sequence: Synthetic oligonucleotide
cgaatgctgtccatcgtccc

SEQ ID NO: 1452 - DNA, 20 bp, Artificial Sequence
  Description of Artificial Sequence: Synthetic oligonucleotide
gacttggctgggagcgaccg

SEQ ID NO: 1453 - DNA, 20 bp, Artificial Sequence
  Description of Artificial Sequence: Synthetic oligonucleotide
ggacctagaacctgggacga

SEQ ID NO: 1454 - DNA, 20 bp, Artificial Sequence
  Description of Artificial Sequence: Synthetic oligonucleotide
gctgcaaggccgaggccccg

SEQ ID NO: 1455 - DNA, 20 bp, Artificial Sequence
  Description of Artificial Sequence: Synthetic oligonucleotide
gctgattctctccagctgca

SEQ ID NO: 1456 - DNA, 20 bp, Artificial Sequence
  Description of Artificial Sequence: Synthetic oligonucleotide
tactgggcgcgtctggcggg

SEQ ID NO: 1457 - DNA, 20 bp, Artificial Sequence
  Description of Artificial Sequence: Synthetic oligonucleotide
attctggtggacctggaacc

SEQ ID NO: 1458 - DNA, 20 bp, Artificial Sequence
  Description of Artificial Sequence: Synthetic oligonucleotide
aggcctgaagagatgtccaa

SEQ ID NO: 1459 - DNA, 20 bp, Artificial Sequence
  Description of Artificial Sequence: Synthetic oligonucleotide
gatgtccaaaggcccctgag

SEQ ID NO: 1460 - DNA, 20 bp, Artificial Sequence
  Description of Artificial Sequence: Synthetic oligonucleotide
ccatggacagtgtccgctca

SEQ ID NO: 1461 - DNA, 20 bp, Artificial Sequence
  Description of Artificial Sequence: Synthetic oligonucleotide
tagtgactcacacagttccc

SEQ ID NO: 1462 - DNA, 20 bp, Artificial Sequence
  Description of Artificial Sequence: Synthetic oligonucleotide
catcataatgagtatggctg

SEQ ID NO: 1463 - DNA, 20 bp, Artificial Sequence
  Description of Artificial Sequence: Synthetic oligonucleotide
tcatcataatgagtatggct

SEQ ID NO: 1464 - DNA, 20 bp, Artificial Sequence
  Description of Artificial Sequence: Synthetic oligonucleotide
atatttccattggccagact

SEQ ID NO: 1465 - DNA, 20 bp, Artificial Sequence
  Description of Artificial Sequence: Synthetic oligonucleotide
tcaattgtaacagtgcaact

SEQ ID NO: 1466 - DNA, 20 bp, Artificial Sequence
  Description of Artificial Sequence: Synthetic oligonucleotide
tacgaccaccgactgggtca

SEQ ID NO: 1467 - DNA, 20 bp, Artificial Sequence
  Description of Artificial Sequence: Synthetic oligonucleotide
gaccaccgactgggtcatgg

SEQ ID NO: 1468 - DNA, 20 bp, Artificial Sequence
  Description of Artificial Sequence: Synthetic oligonucleotide
gcgcaccaccatgacccagt

SEQ ID NO: 1469 - DNA, 20 bp, Artificial Sequence
  Description of Artificial Sequence: Synthetic oligonucleotide
gacacgagataatgaagttg

SEQ ID NO: 1470 - DNA, 20 bp, Artificial Sequence
  Description of Artificial Sequence: Synthetic oligonucleotide
cattagcaaaatcgacctca

SEQ ID NO: 1471 - DNA, 20 bp, Artificial Sequence
  Description of Artificial Sequence: Synthetic oligonucleotide
gccgcactggcccaactgta

SEQ ID NO: 1472 - DNA, 20 bp, Artificial Sequence
  Description of Artificial Sequence: Synthetic oligonucleotide
tcttagaacggctgaatgac

SEQ ID NO: 1473 - DNA, 20 bp, Artificial Sequence
  Description of Artificial Sequence: Synthetic oligonucleotide
tgtcattcagccgttctaag

SEQ ID NO: 1474 - DNA, 20 bp, Artificial Sequence
  Description of Artificial Sequence: Synthetic oligonucleotide
tgccgcactggcccaactgt

SEQ ID NO: 1475 - DNA, 20 bp, Artificial Sequence
  Description of Artificial Sequence: Synthetic oligonucleotide
cggcatcgctcctcaggcac

SEQ ID NO: 1476 - DNA, 20 bp, Artificial Sequence
  Description of Artificial Sequence: Synthetic oligonucleotide
tacttcaaggaatatcacgt

SEQ ID NO: 1477 - DNA, 20 bp, Artificial Sequence
  Description of Artificial Sequence: Synthetic oligonucleotide
tttatcacctgcagcgtcca

SEQ ID NO: 1478 - DNA, 20 bp, Artificial Sequence
  Description of Artificial Sequence: Synthetic oligonucleotide
tcagactccagcagccaaga

SEQ ID NO: 1479 - DNA, 20 bp, Artificial Sequence
  Description of Artificial Sequence: Synthetic oligonucleotide
tttgcaaggcccacaccacg

SEQ ID NO: 1480 - DNA, 20 bp, Artificial Sequence
  Description of Artificial Sequence: Synthetic oligonucleotide
tagttgacttctcagccacg

SEQ ID NO: 1481 - DNA, 20 bp, Artificial Sequence
  Description of Artificial Sequence: Synthetic oligonucleotide
tctccgccatggcatccccc

SEQ ID NO: 1482 - DNA, 20 bp, Artificial Sequence
  Description of Artificial Sequence: Synthetic oligonucleotide
cgaaggacagcgccgcagcc

SEQ ID NO: 1483 - DNA, 20 bp, Artificial Sequence
  Description of Artificial Sequence: Synthetic oligonucleotide
ccccagcgttcgggaacttg

SEQ ID NO: 1484 - DNA, 20 bp, Artificial Sequence
  Description of Artificial Sequence: Synthetic oligonucleotide
gggctgggctccatccccaa

SEQ ID NO: 1485 - DNA, 20 bp, Artificial Sequence
  Description of Artificial Sequence: Synthetic oligonucleotide
ctctggggatctctaggatg

SEQ ID NO: 1486 - DNA, 20 bp, Artificial Sequence
  Description of Artificial Sequence: Synthetic oligonucleotide
agccggccacaggcatggcg

SEQ ID NO: 1487 - DNA, 20 bp, Artificial Sequence
  Description of Artificial Sequence: Synthetic oligonucleotide
cttccagtggaggcattttg

SEQ ID NO: 1488 - DNA, 20 bp, Artificial Sequence
  Description of Artificial Sequence: Synthetic oligonucleotide
ctgccccaaaatgcctccac

SEQ ID NO: 1489 - DNA, 20 bp, Artificial Sequence
  Description of Artificial Sequence: Synthetic oligonucleotide
cacgtttggttgtcagcaga

SEQ ID NO: 1490 - DNA, 20 bp, Artificial Sequence
  Description of Artificial Sequence: Synthetic oligonucleotide
cggccacaggcatggcgcgg

SEQ ID NO: 1491 - DNA, 20 bp, Artificial Sequence
  Description of Artificial Sequence: Synthetic oligonucleotide
ggaacgtgccccggatctgt

SEQ ID NO: 1492 - DNA, 20 bp, Artificial Sequence
  Description of Artificial Sequence: Synthetic oligonucleotide
ccccggatctgtggggtgtg

SEQ ID NO: 1493 - DNA, 20 bp, Artificial Sequence
  Description of Artificial Sequence: Synthetic oligonucleotide
ctgaccctggagactttgac

SEQ ID NO: 1494 - DNA, 20 bp, Artificial Sequence
  Description of Artificial Sequence: Synthetic oligonucleotide
caggcgaagcatgaagcgga

SEQ ID NO: 1495 - DNA, 20 bp, Artificial Sequence
  Description of Artificial Sequence: Synthetic oligonucleotide
actttgaccggaacgtgccc

SEQ ID NO: 1496 - DNA, 20 bp, Artificial Sequence
  Description of Artificial Sequence: Synthetic oligonucleotide
gagaagtgctagctcgggcc

SEQ ID NO: 1497 - DNA, 20 bp, Artificial Sequence
  Description of Artificial Sequence: Synthetic oligonucleotide
agtagctcgccgaggcgccg

SEQ ID NO: 1498 - DNA, 20 bp, Artificial Sequence
  Description of Artificial Sequence: Synthetic oligonucleotide
ggcttcccccgcgcggacca

SEQ ID NO: 1499 - DNA, 20 bp, Artificial Sequence
  Description of Artificial Sequence: Synthetic oligonucleotide
gccgcgagaagtgctagctc

SEQ ID NO: 1500 - DNA, 20 bp, Artificial Sequence
  Description of Artificial Sequence: Synthetic oligonucleotide
cctctccggctcgggctgtg

SEQ ID NO: 1501 - DNA, 20 bp, Artificial Sequence
  Description of Artificial Sequence: Synthetic oligonucleotide
gcccagtgggcacacactcc

SEQ ID NO: 1502 - DNA, 20 bp, Artificial Sequence
  Description of Artificial Sequence: Synthetic oligonucleotide
tgcgtgactgtgcagcgctg

SEQ ID NO: 1503 - DNA, 20 bp, Artificial Sequence
  Description of Artificial Sequence: Synthetic oligonucleotide
agggctcatggtgcccgccg

SEQ ID NO: 1504 - DNA, 20 bp, Artificial Sequence
  Description of Artificial Sequence: Synthetic oligonucleotide
acagtgctgtgaagccagac

SEQ ID NO: 1505 - DNA, 20 bp, Artificial Sequence
  Description of Artificial Sequence: Synthetic oligonucleotide
cggacttggtgctgcccagt

SEQ ID NO: 1506 - DNA, 20 bp, Artificial Sequence
  Description of Artificial Sequence: Synthetic oligonucleotide
ttgcggaaggtcttgtgtgg

SEQ ID NO: 1507 - DNA, 20 bp, Artificial Sequence
  Description of Artificial Sequence: Synthetic oligonucleotide
actcgccgctgccgcccgcg

SEQ ID NO: 1508 - DNA, 20 bp, Artificial Sequence
  Description of Artificial Sequence: Synthetic oligonucleotide
tcctcctcacagtcgctgca

SEQ ID NO: 1509 - DNA, 20 bp, Artificial Sequence
  Description of Artificial Sequence: Synthetic oligonucleotide
gaggaggacctgttgctgcc

SEQ ID NO: 1510 - DNA, 20 bp, Artificial Sequence
  Description of Artificial Sequence: Synthetic oligonucleotide
cgatcaaaaaagccattggc

SEQ ID NO: 1511 - DNA, 20 bp, Artificial Sequence
  Description of Artificial Sequence: Synthetic oligonucleotide
ctatcttttgagaactgggc

SEQ ID NO: 1512 - DNA, 20 bp, Artificial Sequence
  Description of Artificial Sequence: Synthetic oligonucleotide
gcttcataatctgccatgga

SEQ ID NO: 1513 - DNA, 20 bp, Artificial Sequence
  Description of Artificial Sequence: Synthetic oligonucleotide
ccaaattgcagatttatcaa

SEQ ID NO: 1514 - DNA, 20 bp, Artificial Sequence
  Description of Artificial Sequence: Synthetic oligonucleotide
cttcttcactatacatggca

SEQ ID NO: 1515 - DNA, 20 bp, Artificial Sequence
  Description of Artificial Sequence: Synthetic oligonucleotide
atagtctggccagttctgaa

SEQ ID NO: 1516 - DNA, 20 bp, Artificial Sequence
  Description of Artificial Sequence: Synthetic oligonucleotide
taaaggagcatcctgatgct

SEQ ID NO: 1517 - DNA, 20 bp, Artificial Sequence
  Description of Artificial Sequence: Synthetic oligonucleotide
aacaagaatggcccaaacat

SEQ ID NO: 1518 - DNA, 20 bp, Artificial Sequence
  Description of Artificial Sequence: Synthetic oligonucleotide
ttaaatgcttagatttgact

SEQ ID NO: 1519 - DNA, 20 bp, Artificial Sequence
  Description of Artificial Sequence: Synthetic oligonucleotide
ggcaaatatagctgtctcct

SEQ ID NO: 1520 - DNA, 20 bp, Artificial Sequence
  Description of Artificial Sequence: Synthetic oligonucleotide
tggtctcaaaaatatatccc

SEQ ID NO: 1521 - DNA, 20 bp, Artificial Sequence
  Description of Artificial Sequence: Synthetic oligonucleotide
gaagcaagatcaatcgctac

SEQ ID NO: 1522 - DNA, 20 bp, Artificial Sequence
  Description of Artificial Sequence: Synthetic oligonucleotide
ggatcctccaaatggtgtca

SEQ ID NO: 1523 - DNA, 20 bp, Artificial Sequence
  Description of Artificial Sequence: Synthetic oligonucleotide
ttgaatcctggaaatcaacg

SEQ ID NO: 1524 - DNA, 20 bp, Artificial Sequence
  Description of Artificial Sequence: Synthetic oligonucleotide
atgtttcggcgaagtgtgga

SEQ ID NO: 1525 - DNA, 20 bp, Artificial Sequence
  Description of Artificial Sequence: Synthetic oligonucleotide
cagagtatcaaattgtgctc

SEQ ID NO: 1526 - DNA, 20 bp, Artificial Sequence
  Description of Artificial Sequence: Synthetic oligonucleotide
cgttcagggcataatcgccg

SEQ ID NO: 1527 - DNA, 20 bp, Artificial Sequence
  Description of Artificial Sequence: Synthetic oligonucleotide
tcacggtggataccagcacg

SEQ ID NO: 1528 - DNA, 20 bp, Artificial Sequence
  Description of Artificial Sequence: Synthetic oligonucleotide
catcacgcttatccacccca

SEQ ID NO: 1529 - DNA, 20 bp, Artificial Sequence
  Description of Artificial Sequence: Synthetic oligonucleotide
ccttggaccaaagtaaagcg

SEQ ID NO: 1530 - DNA, 20 bp, Artificial Sequence
  Description of Artificial Sequence: Synthetic oligonucleotide
ggcgagcgtgatgtccgcat

SEQ ID NO: 1531 - DNA, 20 bp, Artificial Sequence
  Description of Artificial Sequence: Synthetic oligonucleotide
cgaggctgggccatcaacgt

SEQ ID NO: 1532 - DNA, 20 bp, Artificial Sequence
  Description of Artificial Sequence: Synthetic oligonucleotide
gcaacagcaaaggaccactg

SEQ ID NO: 1533 - DNA, 20 bp, Artificial Sequence
  Description of Artificial Sequence: Synthetic oligonucleotide
acaaccgccacatctaccca

SEQ ID NO: 1534 - DNA, 20 bp, Artificial Sequence
  Description of Artificial Sequence: Synthetic oligonucleotide
gcaaagtctgtggcaatgtg

SEQ ID NO: 1535 - DNA, 20 bp, Artificial Sequence
  Description of Artificial Sequence: Synthetic oligonucleotide
agtcatacctgaacaaccca

SEQ ID NO: 1536 - DNA, 20 bp, Artificial Sequence
  Description of Artificial Sequence: Synthetic oligonucleotide
ttacatattatagcaatcgt

SEQ ID NO: 1537 - DNA, 20 bp, Artificial Sequence
  Description of Artificial Sequence: Synthetic oligonucleotide
catggtacgatgtgatacag

SEQ ID NO: 1538 - DNA, 20 bp, Artificial Sequence
  Description of Artificial Sequence: Synthetic oligonucleotide
atacccaatagagtccgagg

SEQ ID NO: 1539 - DNA, 20 bp, Artificial Sequence
  Description of Artificial Sequence: Synthetic oligonucleotide
tcataattaacacacatcag

SEQ ID NO: 1540 - DNA, 20 bp, Artificial Sequence
  Description of Artificial Sequence: Synthetic oligonucleotide
acaaatgattaagttgacac

SEQ ID NO: 1541 - DNA, 20 bp, Artificial Sequence
  Description of Artificial Sequence: Synthetic oligonucleotide
gggggtagcagacaaacctg

SEQ ID NO: 1542 - DNA, 20 bp, Artificial Sequence
  Description of Artificial Sequence: Synthetic oligonucleotide
ccatgagagaccaatacatg

SEQ ID NO: 1543 - DNA, 20 bp, Artificial Sequence
  Description of Artificial Sequence: Synthetic oligonucleotide
tgaatatgatcccaccatag

SEQ ID NO: 1544 - DNA, 20 bp, Artificial Sequence
  Description of Artificial Sequence: Synthetic oligonucleotide
tgatgtacctatggtgctag

SEQ ID NO: 1545 - DNA, 20 bp, Artificial Sequence
  Description of Artificial Sequence: Synthetic oligonucleotide
ttgcggatattaacctctac

SEQ ID NO: 1546 - DNA, 20 bp, Artificial Sequence
  Description of Artificial Sequence: Synthetic oligonucleotide
cacgacattcaattgccatg

SEQ ID NO: 1547 - DNA, 20 bp, Artificial Sequence
  Description of Artificial Sequence: Synthetic oligonucleotide
agtgaagggcttgatatcaa

SEQ ID NO: 1548 - DNA, 20 bp, Artificial Sequence
  Description of Artificial Sequence: Synthetic oligonucleotide
tggcatctctgtgtcaacca

SEQ ID NO: 1549 - DNA, 20 bp, Artificial Sequence
  Description of Artificial Sequence: Synthetic oligonucleotide
acagatgtgatcttaactgt

SEQ ID NO: 1550 - DNA, 20 bp, Artificial Sequence
  Description of Artificial Sequence: Synthetic oligonucleotide
gcataccttcccactcacgg

SEQ ID NO: 1551 - DNA, 20 bp, Artificial Sequence
  Description of Artificial Sequence: Synthetic oligonucleotide
caggacacctgtacgtcgtg

SEQ ID NO: 1552 - DNA, 20 bp, Artificial Sequence
  Description of Artificial Sequence: Synthetic oligonucleotide
gaagaagtataggcggaccc

SEQ ID NO: 1553 - DNA, 20 bp, Artificial Sequence
  Description of Artificial Sequence: Synthetic oligonucleotide
tcgcctgggtccacgaacac

SEQ ID NO: 1554 - DNA, 20 bp, Artificial Sequence
  Description of Artificial Sequence: Synthetic oligonucleotide
tcccgtcagaacatggaccc

SEQ ID NO: 1555 - DNA, 20 bp, Artificial Sequence
  Description of Artificial Sequence: Synthetic oligonucleotide
agcattgtaaagatgtatcg

SEQ ID NO: 1556 - DNA, 20 bp, Artificial Sequence
  Description of Artificial Sequence: Synthetic oligonucleotide
tgtacgcttatcctgactga

SEQ ID NO: 1557 - DNA, 20 bp, Artificial Sequence
  Description of Artificial Sequence: Synthetic oligonucleotide
attcagtaccaaatttactg

SEQ ID NO: 1558 - DNA, 20 bp, Artificial Sequence
  Description of Artificial Sequence: Synthetic oligonucleotide
tcaccgtactgtccacgccg

SEQ ID NO: 1559 - DNA, 20 bp, Artificial Sequence
  Description of Artificial Sequence: Synthetic oligonucleotide
tggacatactcaagacagag

SEQ ID NO: 1560 - DNA, 20 bp, Artificial Sequence
  Description of Artificial Sequence: Synthetic oligonucleotide
cacagactggtcccccaagg

SEQ ID NO: 1561 - DNA, 20 bp, Artificial Sequence
  Description of Artificial Sequence: Synthetic oligonucleotide
tcccagctaacacagcagag

SEQ ID NO: 1562 - DNA, 20 bp, Artificial Sequence
  Description of Artificial Sequence: Synthetic oligonucleotide
gacctggaacggtaccacca

SEQ ID NO: 1563 - DNA, 20 bp, Artificial Sequence
  Description of Artificial Sequence: Synthetic oligonucleotide
tcaatgcagagaacccgaga

SEQ ID NO: 1564 - DNA, 20 bp, Artificial Sequence
  Description of Artificial Sequence: Synthetic oligonucleotide
tgtccttcaagaaaggcgag

SEQ ID NO: 1565 - DNA, 20 bp, Artificial Sequence
  Description of Artificial Sequence: Synthetic oligonucleotide
gtcacggagtacatgagcaa

SEQ ID NO: 1566 - DNA, 20 bp, Artificial Sequence
  Description of Artificial Sequence: Synthetic oligonucleotide
ggcgagtcggaggacaactg

SEQ ID NO: 1567 - DNA, 20 bp, Artificial Sequence
  Description of Artificial Sequence: Synthetic oligonucleotide
gtccaggagcctaatgacgc

SEQ ID NO: 1568 - DNA, 20 bp, Artificial Sequence
  Description of Artificial Sequence: Synthetic oligonucleotide
aaggaccggatttccgactg

SEQ ID NO: 1569 - DNA, 20 bp, Artificial Sequence
  Description of Artificial Sequence: Synthetic oligonucleotide
tcttcgacttcatcacggaa

SEQ ID NO: 1570 - DNA, 20 bp, Artificial Sequence
  Description of Artificial Sequence: Synthetic oligonucleotide
gatctggcagaacttcgact

SEQ ID NO: 1571 - DNA, 20 bp, Artificial Sequence
  Description of Artificial Sequence: Synthetic oligonucleotide
cttacgtcgcaacgccaagg

SEQ ID NO: 1572 - DNA, 20 bp, Artificial Sequence
  Description of Artificial Sequence: Synthetic oligonucleotide
tggtgtggaccctcccgatg

SEQ ID NO: 1573 - DNA, 20 bp, Artificial Sequence
  Description of Artificial Sequence: Synthetic oligonucleotide
cacatggcgtgcatgtacgt

SEQ ID NO: 1574 - DNA, 20 bp, Artificial Sequence
  Description of Artificial Sequence: Synthetic oligonucleotide
cgcacccgacaggacgtagt

SEQ ID NO: 1575 - DNA, 20 bp, Artificial Sequence
  Description of Artificial Sequence: Synthetic oligonucleotide
cgtggaagacgtcccccgcg

SEQ ID NO: 1576 - DNA, 20 bp, Artificial Sequence
  Description of Artificial Sequence: Synthetic oligonucleotide
ctctcccagtcatcccaatg

SEQ ID NO: 1577 - DNA, 20 bp, Artificial Sequence
  Description of Artificial Sequence: Synthetic oligonucleotide
gccgacgcacagcttccgag

SEQ ID NO: 1578 - DNA, 20 bp, Artificial Sequence
  Description of Artificial Sequence: Synthetic oligonucleotide
agctccaaatagtaactcgg

SEQ ID NO: 1579 - DNA, 20 bp, Artificial Sequence
  Description of Artificial Sequence: Synthetic oligonucleotide
atctctggccttgtaaacgg

SEQ ID NO: 1580 - DNA, 20 bp, Artificial Sequence
  Description of Artificial Sequence: Synthetic oligonucleotide
tttccataaaatcaaagaca

SEQ ID NO: 1581 - DNA, 20 bp, Artificial Sequence
  Description of Artificial Sequence: Synthetic oligonucleotide
ttaaaaaccttaccctatgt

SEQ ID NO: 1582 - DNA, 20 bp, Artificial Sequence
  Description of Artificial Sequence: Synthetic oligonucleotide
cgatcagcgatgcacccacg

SEQ ID NO: 1583 - DNA, 20 bp, Artificial Sequence
  Description of Artificial Sequence: Synthetic oligonucleotide
cactaacgattcggtcgtgg

SEQ ID NO: 1584 - DNA, 20 bp, Artificial Sequence
  Description of Artificial Sequence: Synthetic oligonucleotide
gagctacacgcgttatctac

SEQ ID NO: 1585 - DNA, 20 bp, Artificial Sequence
  Description of Artificial Sequence: Synthetic oligonucleotide
tctccttcgagaactgccaa

SEQ ID NO: 1586 - DNA, 20 bp, Artificial Sequence
  Description of Artificial Sequence: Synthetic oligonucleotide
catcctagtcaactcccgtg

SEQ ID NO: 1587 - DNA, 20 bp, Artificial Sequence
  Description of Artificial Sequence: Synthetic oligonucleotide
gcagcagcgaaagcgccttg

SEQ ID NO: 1588 - DNA, 20 bp, Artificial Sequence
  Description of Artificial Sequence: Synthetic oligonucleotide
gggcacaaggtcctacatgt

SEQ ID NO: 1589 - DNA, 20 bp, Artificial Sequence
  Description of Artificial Sequence: Synthetic oligonucleotide
tatggtgcgttctacagcga

SEQ ID NO: 1590 - DNA, 20 bp, Artificial Sequence
  Description of Artificial Sequence: Synthetic oligonucleotide
cacactccaggccatcgtca

SEQ ID NO: 1591 - DNA, 20 bp, Artificial Sequence
  Description of Artificial Sequence: Synthetic oligonucleotide
catctatccatgacaccact

SEQ ID NO: 1592 - DNA, 20 bp, Artificial Sequence
  Description of Artificial Sequence: Synthetic oligonucleotide
gcagcaccaagtccggatgc

SEQ ID NO: 1593 - DNA, 20 bp, Artificial Sequence
  Description of Artificial Sequence: Synthetic oligonucleotide
cggtacccgagcagtcagct

SEQ ID NO: 1594 - DNA, 20 bp, Artificial Sequence
  Description of Artificial Sequence: Synthetic oligonucleotide
gtgccactagaataggctgt

SEQ ID NO: 1595 - DNA, 20 bp, Artificial Sequence
  Description of Artificial Sequence: Synthetic oligonucleotide
cctttacatcaagttagatg

SEQ ID NO: 1596 - DNA, 20 bp, Artificial Sequence
  Description of Artificial Sequence: Synthetic oligonucleotide
caccgatatacataggaacc

SEQ ID NO: 1597 - DNA, 20 bp, Artificial Sequence
  Description of Artificial Sequence: Synthetic oligonucleotide
tagttggagctctcttgatg

SEQ ID NO: 1598 - DNA, 20 bp, Artificial Sequence
  Description of Artificial Sequence: Synthetic oligonucleotide
gggccggtgcacaaacagcg

SEQ ID NO: 1599 - DNA, 20 bp, Artificial Sequence
  Description of Artificial Sequence: Synthetic oligonucleotide
ttcggctgcttccatcaacg

SEQ ID NO: 1600 - DNA, 20 bp, Artificial Sequence
  Description of Artificial Sequence: Synthetic oligonucleotide
acttatacgactcagaacct

SEQ ID NO: 1601 - DNA, 20 bp, Artificial Sequence
  Description of Artificial Sequence: Synthetic oligonucleotide
caacacactaactcggatag

SEQ ID NO: 1602 - DNA, 20 bp, Artificial Sequence
  Description of Artificial Sequence: Synthetic oligonucleotide
tagccgcaatgtgctacaca

SEQ ID NO: 1603 - DNA, 20 bp, Artificial Sequence
  Description of Artificial Sequence: Synthetic oligonucleotide
cctttacaatctcaggatcg

SEQ ID NO: 1604 - DNA, 20 bp, Artificial Sequence
  Description of Artificial Sequence: Synthetic oligonucleotide
cgtccgctgttactcagctg

SEQ ID NO: 1605 - DNA, 20 bp, Artificial Sequence
  Description of Artificial Sequence: Synthetic oligonucleotide
ccgggagactcatgagatcg

SEQ ID NO: 1606 - DNA, 20 bp, Artificial Sequence
  Description of Artificial Sequence: Synthetic oligonucleotide
ggcggcatctagtagaaaag

SEQ ID NO: 1607 - DNA, 20 bp, Artificial Sequence
  Description of Artificial Sequence: Synthetic oligonucleotide
taagatgaccagcatcacga

SEQ ID NO: 1608 - DNA, 20 bp, Artificial Sequence
  Description of Artificial Sequence: Synthetic oligonucleotide
cagtggcacgatgaagccaa

SEQ ID NO: 1609 - DNA, 20 bp, Artificial Sequence
  Description of Artificial Sequence: Synthetic oligonucleotide
ccagcctgctatgaggacat

SEQ ID NO: 1610 - DNA, 20 bp, Artificial Sequence
  Description of Artificial Sequence: Synthetic oligonucleotide
gtacattgtataaagaccac

SEQ ID NO: 1611 - DNA, 20 bp, Artificial Sequence
  Description of Artificial Sequence: Synthetic oligonucleotide
ataattggataaaattgtct

SEQ ID NO: 1612 - DNA, 20 bp, Artificial Sequence
  Description of Artificial Sequence: Synthetic oligonucleotide
ctccgcgtacaagcatctga

SEQ ID NO: 1613 - DNA, 20 bp, Artificial Sequence
  Description of Artificial Sequence: Synthetic oligonucleotide
tagatgacaactttatcctg

SEQ ID NO: 1614 - DNA, 20 bp, Artificial Sequence
  Description of Artificial Sequence: Synthetic oligonucleotide
caagaggtgaccatcccccg

SEQ ID NO: 1615 - DNA, 20 bp, Artificial Sequence
  Description of Artificial Sequence: Synthetic oligonucleotide
ctccaggtggttgttcacca

SEQ ID NO: 1616 - DNA, 20 bp, Artificial Sequence
  Description of Artificial Sequence: Synthetic oligonucleotide
cggacaggtacaactgccga

SEQ ID NO: 1617 - DNA, 20 bp, Artificial Sequence
  Description of Artificial Sequence: Synthetic oligonucleotide
ctctccgtccacactctcag

SEQ ID NO: 1618 - DNA, 20 bp, Artificial Sequence
  Description of Artificial Sequence: Synthetic oligonucleotide
caaaacattatactggcatg

SEQ ID NO: 1619 - DNA, 20 bp, Artificial Sequence
  Description of Artificial Sequence: Synthetic oligonucleotide
tcaatcacagcatccaaagg

SEQ ID NO: 1620 - DNA, 20 bp, Artificial Sequence
  Description of Artificial Sequence: Synthetic oligonucleotide
tggatgtgggaaaaccacac

SEQ ID NO: 1621 - DNA, 20 bp, Artificial Sequence
  Description of Artificial Sequence: Synthetic oligonucleotide
ggagatttaccaacaaccat

SEQ ID NO: 1622 - DNA, 20 bp, Artificial Sequence
  Description of Artificial Sequence: Synthetic oligonucleotide
tcacatctagtggtatcctg

SEQ ID NO: 1623 - DNA, 20 bp, Artificial Sequence
  Description of Artificial Sequence: Synthetic oligonucleotide
ctgtttgcggataggatagg

SEQ ID NO: 1624 - DNA, 20 bp, Artificial Sequence
  Description of Artificial Sequence: Synthetic oligonucleotide
atttaagatacttacacagt

SEQ ID NO: 1625 - DNA, 20 bp, Artificial Sequence
  Description of Artificial Sequence: Synthetic oligonucleotide
ctgggcttatgggatacagc

SEQ ID NO: 1626 - DNA, 20 bp, Artificial Sequence
  Description of Artificial Sequence: Synthetic oligonucleotide
tcttgtgtaggagtatacgg

SEQ ID NO: 1627 - DNA, 20 bp, Artificial Sequence
  Description of Artificial Sequence: Synthetic oligonucleotide
gactgaattaccttgttacg

SEQ ID NO: 1628 - DNA, 20 bp, Artificial Sequence
  Description of Artificial Sequence: Synthetic oligonucleotide
gaagttagtgtacgaactgg

SEQ ID NO: 1629 - DNA, 20 bp, Artificial Sequence
  Description of Artificial Sequence: Synthetic oligonucleotide
acctaatgaagagtatacct

SEQ ID NO: 1630 - DNA, 20 bp, Artificial Sequence
  Description of Artificial Sequence: Synthetic oligonucleotide
aatgaattctcagacatgtg

SEQ ID NO: 1631 - DNA, 20 bp, Artificial Sequence
  Description of Artificial Sequence: Synthetic oligonucleotide
atagagggacaaatacctag

SEQ ID NO: 1632 - DNA, 20 bp, Artificial Sequence
  Description of Artificial Sequence: Synthetic oligonucleotide
agtgactcacacagttccca

SEQ ID NO: 1633 - DNA, 20 bp, Artificial Sequence
  Description of Artificial Sequence: Synthetic oligonucleotide
gcatgcttctgtcaaaaaca

SEQ ID NO: 1634 - DNA, 20 bp, Artificial Sequence
  Description of Artificial Sequence: Synthetic oligonucleotide
ccttagatcgttagacacgg

SEQ ID NO: 1635 - DNA, 20 bp, Artificial Sequence
  Description of Artificial Sequence: Synthetic oligonucleotide
tgaatctctctgtcgtgaca

SEQ ID NO: 1636 - DNA, 20 bp, Artificial Sequence
  Description of Artificial Sequence: Synthetic oligonucleotide
gttagccagagccactaact

SEQ ID NO: 1637 - DNA, 20 bp, Artificial Sequence
  Description of Artificial Sequence: Synthetic oligonucleotide
tcactacaccaaacaatgtg

SEQ ID NO: 1638 - DNA, 20 bp, Artificial Sequence
  Description of Artificial Sequence: Synthetic oligonucleotide
agctttgatccaatgatgtg

SEQ ID NO: 1639 - DNA, 20 bp, Artificial Sequence
  Description of Artificial Sequence: Synthetic oligonucleotide
aacagcatgagaacttgaca

SEQ ID NO: 1640 - DNA, 20 bp, Artificial Sequence
  Description of Artificial Sequence: Synthetic oligonucleotide
tttccctctaaagtaacatg

SEQ ID NO: 1641 - DNA, 20 bp, Artificial Sequence
  Description of Artificial Sequence: Synthetic oligonucleotide
gagagcgcacgtgtgtgcgt

SEQ ID NO: 1642 - DNA, 20 bp, Artificial Sequence
  Description of Artificial Sequence: Synthetic oligonucleotide
ggtcctaacaaacataagca

SEQ ID NO: 1643 - DNA, 20 bp, Artificial Sequence
  Description of Artificial Sequence: Synthetic oligonucleotide
tttcaaacttactctatcag

SEQ ID NO: 1644 - DNA, 20 bp, Artificial Sequence
  Description of Artificial Sequence: Synthetic oligonucleotide
aagaagttcattatcacaca

SEQ ID NO: 1645 - DNA, 20 bp, Artificial Sequence
  Description of Artificial Sequence: Synthetic oligonucleotide
tattggaaacacacttgaca

SEQ ID NO: 1646 - DNA, 20 bp, Artificial Sequence
  Description of Artificial Sequence: Synthetic oligonucleotide
gctcgatgtctaggttgcgg

SEQ ID NO: 1647 - DNA, 20 bp, Artificial Sequence
  Description of Artificial Sequence: Synthetic oligonucleotide
ttcctctcaccaatgaccgt

SEQ ID NO: 1648 - DNA, 20 bp, Artificial Sequence
  Description of Artificial Sequence: Synthetic oligonucleotide
gagccgctccatcaggagtg

SEQ ID NO: 1649 - DNA, 20 bp, Artificial Sequence
  Description of Artificial Sequence: Synthetic oligonucleotide
gtgacaagaccattggtgga

SEQ ID NO: 1650 - DNA, 20 bp, Artificial Sequence
  Description of Artificial Sequence: Synthetic oligonucleotide
gctccgataacaccgtcacg

SEQ ID NO: 1651 - DNA, 20 bp, Artificial Sequence
  Description of Artificial Sequence: Synthetic oligonucleotide
tcatgaatacacaacaaagg

SEQ ID NO: 1652 - DNA, 20 bp, Artificial Sequence
  Description of Artificial Sequence: Synthetic oligonucleotide
ccatacgagccccttcccga

SEQ ID NO: 1653 - DNA, 20 bp, Artificial Sequence
  Description of Artificial Sequence: Synthetic oligonucleotide
gtggcgaccatcccaagatg

SEQ ID NO: 1654 - DNA, 20 bp, Artificial Sequence
  Description of Artificial Sequence: Synthetic oligonucleotide
tcttcacacgctcaacgccg

SEQ ID NO: 1655 - DNA, 20 bp, Artificial Sequence
  Description of Artificial Sequence: Synthetic oligonucleotide
cgtcaacctgaccgtacgag

SEQ ID NO: 1656 - DNA, 20 bp, Artificial Sequence
  Description of Artificial Sequence: Synthetic oligonucleotide
catgtggaatactaccaaga

SEQ ID NO: 1657 - DNA, 20 bp, Artificial Sequence
  Description of Artificial Sequence: Synthetic oligonucleotide
tcatgccatcaacttgacgc

SEQ ID NO: 1658 - DNA, 20 bp, Artificial Sequence
  Description of Artificial Sequence: Synthetic oligonucleotide
cctacgtggaggcaaacatg

SEQ ID NO: 1659 - DNA, 20 bp, Artificial Sequence
  Description of Artificial Sequence: Synthetic oligonucleotide
aggactgcctgattgacaag

SEQ ID NO: 1660 - DNA, 20 bp, Artificial Sequence
  Description of Artificial Sequence: Synthetic oligonucleotide
aggaagccatgtttcctgag

SEQ ID NO: 1661 - DNA, 20 bp, Artificial Sequence
  Description of Artificial Sequence: Synthetic oligonucleotide
caaggaccggaacgagaatg

SEQ ID NO: 1662 - DNA, 20 bp, Artificial Sequence
  Description of Artificial Sequence: Synthetic oligonucleotide
aggcgctggagaccttacga

SEQ ID NO: 1663 - DNA, 20 bp, Artificial Sequence
  Description of Artificial Sequence: Synthetic oligonucleotide
gtaataacaccagtacggac

SEQ ID NO: 1664 - DNA, 20 bp, Artificial Sequence
  Description of Artificial Sequence: Synthetic oligonucleotide
agtcgctggagattatctct

SEQ ID NO: 1665 - DNA, 20 bp, Artificial Sequence
  Description of Artificial Sequence: Synthetic oligonucleotide
ccaaaagtcgccctcccggg

SEQ ID NO: 1666 - DNA, 20 bp, Artificial Sequence
  Description of Artificial Sequence: Synthetic oligonucleotide
tcaggaaatgatccgcacag

SEQ ID NO: 1667 - DNA, 20 bp, Artificial Sequence
  Description of Artificial Sequence: Synthetic oligonucleotide
ggtgatggcctggacaacca

SEQ ID NO: 1668 - DNA, 20 bp, Artificial Sequence
  Description of Artificial Sequence: Synthetic oligonucleotide
cagcatcggatgcttaggag

SEQ ID NO: 1669 - DNA, 20 bp, Artificial Sequence
  Description of Artificial Sequence: Synthetic oligonucleotide
gtgaagggggtaatgtgacg

SEQ ID NO: 1670 - DNA, 20 bp, Artificial Sequence
  Description of Artificial Sequence: Synthetic oligonucleotide
tgcagtcggtccactctgag

SEQ ID NO: 1671 - DNA, 20 bp, Artificial Sequence
  Description of Artificial Sequence: Synthetic oligonucleotide
gttacctgtagggaatgccg

SEQ ID NO: 1672 - DNA, 20 bp, Artificial Sequence
  Description of Artificial Sequence: Synthetic oligonucleotide
aaggactgggcaaagtggaa

SEQ ID NO: 1673 - DNA, 20 bp, Artificial Sequence
  Description of Artificial Sequence: Synthetic oligonucleotide
gacctggagacagatggcgg

SEQ ID NO: 1674 - DNA, 20 bp, Artificial Sequence
  Description of Artificial Sequence: Synthetic oligonucleotide
acaccacctgaagtgactcg

SEQ ID NO: 1675 - DNA, 20 bp, Artificial Sequence
  Description of Artificial Sequence: Synthetic oligonucleotide
tggtattggaataactcaca

SEQ ID NO: 1676 - DNA, 20 bp, Artificial Sequence
  Description of Artificial Sequence: Synthetic oligonucleotide
cttactgcaatgctcgctgg

SEQ ID NO: 1677 - DNA, 20 bp, Artificial Sequence
  Description of Artificial Sequence: Synthetic oligonucleotide
tttctggagtactgtagtgg

SEQ ID NO: 1678 - DNA, 20 bp, Artificial Sequence
  Description of Artificial Sequence: Synthetic oligonucleotide
gccacgcagtccattcaggg

SEQ ID NO: 1679 - DNA, 20 bp, Artificial Sequence
  Description of Artificial Sequence: Synthetic oligonucleotide
taaaacctataacgttgctg

SEQ ID NO: 1680 - DNA, 20 bp, Artificial Sequence
  Description of Artificial Sequence: Synthetic oligonucleotide
acctgccgggagttaccctg

SEQ ID NO: 1681 - DNA, 20 bp, Artificial Sequence
  Description of Artificial Sequence: Synthetic oligonucleotide
tgtatttatacagaaccacc

SEQ ID NO: 1682 - DNA, 20 bp, Artificial Sequence
  Description of Artificial Sequence: Synthetic oligonucleotide
ttataggcgtggaattgcag

SEQ ID NO: 1683 - DNA, 20 bp, Artificial Sequence
  Description of Artificial Sequence: Synthetic oligonucleotide
ggagagaaagcactgaaagg

SEQ ID NO: 1684 - DNA, 20 bp, Artificial Sequence
  Description of Artificial Sequence: Synthetic oligonucleotide
gaggcgcccccctaccgaag

SEQ ID NO: 1685 - DNA, 20 bp, Artificial Sequence
  Description of Artificial Sequence: Synthetic oligonucleotide
aagattccaaccatctggat

SEQ ID NO: 1686 - DNA, 20 bp, Artificial Sequence
  Description of Artificial Sequence: Synthetic oligonucleotide
gggcgcaccttccccaagcg

SEQ ID NO: 1687 - DNA, 20 bp, Artificial Sequence
  Description of Artificial Sequence: Synthetic oligonucleotide
accggtgtagtgcaccacgc

SEQ ID NO: 1688 - DNA, 20 bp, Artificial Sequence
  Description of Artificial Sequence: Synthetic oligonucleotide
ggcaagcaggaggtgatccg

SEQ ID NO: 1689 - DNA, 20 bp, Artificial Sequence
  Description of Artificial Sequence: Synthetic oligonucleotide
gaaaccatctccccaggaga

SEQ ID NO: 1690 - DNA, 20 bp, Artificial Sequence
  Description of Artificial Sequence: Synthetic oligonucleotide
gacatgatggtagacacctg

SEQ ID NO: 1691 - DNA, 20 bp, Artificial Sequence
  Description of Artificial Sequence: Synthetic oligonucleotide
cgtggaggagttcgccaccg

SEQ ID NO: 1692 - DNA, 20 bp, Artificial Sequence
  Description of Artificial Sequence: Synthetic oligonucleotide
agatggtagtgacagtctag

SEQ ID NO: 1693 - DNA, 20 bp, Artificial Sequence
  Description of Artificial Sequence: Synthetic oligonucleotide
tgactggtccgtagtgagag

SEQ ID NO: 1694 - DNA, 20 bp, Artificial Sequence
  Description of Artificial Sequence: Synthetic oligonucleotide
gtcctgcaaagacactactg

SEQ ID NO: 1695 - DNA, 20 bp, Artificial Sequence
  Description of Artificial Sequence: Synthetic oligonucleotide
ggaagaaagtaaccgtcact

SEQ ID NO: 1696 - DNA, 20 bp, Artificial Sequence
  Description of Artificial Sequence: Synthetic oligonucleotide
tgtggaacattacagtccaa

SEQ ID NO: 1697 - DNA, 20 bp, Artificial Sequence
  Description of Artificial Sequence: Synthetic oligonucleotide
agtctccaacaggttggcta

SEQ ID NO: 1698 - DNA, 20 bp, Artificial Sequence
  Description of Artificial Sequence: Synthetic oligonucleotide
atcaccaccattcgcactcg

SEQ ID NO: 1699 - DNA, 20 bp, Artificial Sequence
  Description of Artificial Sequence: Synthetic oligonucleotide
agccatggaactaaaagttg

SEQ ID NO: 1700 - DNA, 20 bp, Artificial Sequence
  Description of Artificial Sequence: Synthetic oligonucleotide
tatgttgtccaaaaacccag

SEQ ID NO: 1701 - DNA, 20 bp, Artificial Sequence
  Description of Artificial Sequence: Synthetic oligonucleotide
gtcctcaacaaacaaggaca

SEQ ID NO: 1702 - DNA, 20 bp, Artificial Sequence
  Description of Artificial Sequence: Synthetic oligonucleotide
tgtggtaaggcatatccaag

SEQ ID NO: 1703 - DNA, 20 bp, Artificial Sequence
  Description of Artificial Sequence: Synthetic oligonucleotide
gactaacgtgacgtactggg

SEQ ID NO: 1704 - DNA, 20 bp, Artificial Sequence
  Description of Artificial Sequence: Synthetic oligonucleotide
gtcccctatgatcaccaacg

SEQ ID NO: 1705 - DNA, 20 bp, Artificial Sequence
  Description of Artificial Sequence: Synthetic oligonucleotide
ctcccgtgtctagcccagtg

SEQ ID NO: 1706 - DNA, 20 bp, Artificial Sequence
  Description of Artificial Sequence: Synthetic oligonucleotide
agttgggggagcactcgtag

SEQ ID NO: 1707 - DNA, 20 bp, Artificial Sequence
  Description of Artificial Sequence: Synthetic oligonucleotide
ccatccagtgtcgaccctgg

SEQ ID NO: 1708 - DNA, 20 bp, Artificial Sequence
  Description of Artificial Sequence: Synthetic oligonucleotide
catgaacgccaagcaccaca

SEQ ID NO: 1709 - DNA, 20 bp, Artificial Sequence
  Description of Artificial Sequence: Synthetic oligonucleotide
gctgctccttctagtgtggg

SEQ ID NO: 1710 - DNA, 20 bp, Artificial Sequence
  Description of Artificial Sequence: Synthetic oligonucleotide
gctgatagggagtcgatcgg

SEQ ID NO: 1711 - DNA, 20 bp, Artificial Sequence
  Description of Artificial Sequence: Synthetic oligonucleotide
ggtgcgaaaaacgcacgatg

SEQ ID NO: 1712 - DNA, 20 bp, Artificial Sequence
  Description of Artificial Sequence: Synthetic oligonucleotide
gtgaccatacatccgcctca

SEQ ID NO: 1713 - DNA, 20 bp, Artificial Sequence
  Description of Artificial Sequence: Synthetic oligonucleotide
ctcaagtacttgcaccagcg

SEQ ID NO: 1714 - DNA, 20 bp, Artificial Sequence
  Description of Artificial Sequence: Synthetic oligonucleotide
ctgcccacctaagcttactg

SEQ ID NO: 1715 - DNA, 20 bp, Artificial Sequence
  Description of Artificial Sequence: Synthetic oligonucleotide
gtggcatgttagtcacggtg

SEQ ID NO: 1716 - DNA, 20 bp, Artificial Sequence
  Description of Artificial Sequence: Synthetic oligonucleotide
gtgggtatcaacgtgaccgt

SEQ ID NO: 1717 - DNA, 20 bp, Artificial Sequence
  Description of Artificial Sequence: Synthetic oligonucleotide
ctcggaccacatattcagga

SEQ ID NO: 1718 - DNA, 20 bp, Artificial Sequence
  Description of Artificial Sequence: Synthetic oligonucleotide
ctgtgataagttgctcaggg

SEQ ID NO: 1719 - DNA, 20 bp, Artificial Sequence
  Description of Artificial Sequence: Synthetic oligonucleotide
aggttggacgctcaatatcg

SEQ ID NO: 1720 - DNA, 20 bp, Artificial Sequence
  Description of Artificial Sequence: Synthetic oligonucleotide
ctggagacccgtgcactggt

SEQ ID NO: 1721 - DNA, 20 bp, Artificial Sequence
  Description of Artificial Sequence: Synthetic oligonucleotide
tacagaaagctgttcatggt

SEQ ID NO: 1722 - DNA, 20 bp, Artificial Sequence
  Description of Artificial Sequence: Synthetic oligonucleotide
catgacacaacagctcacat

SEQ ID NO: 1723 - DNA, 20 bp, Artificial Sequence
  Description of Artificial Sequence: Synthetic oligonucleotide
caacaagaactcgttacgct

SEQ ID NO: 1724 - DNA, 20 bp, Artificial Sequence
  Description of Artificial Sequence: Synthetic oligonucleotide
aagcacgcaataaagacaag

SEQ ID NO: 1725 - DNA, 20 bp, Artificial Sequence
  Description of Artificial Sequence: Synthetic oligonucleotide
ctctacacactttaccgtgg

SEQ ID NO: 1726 - DNA, 20 bp, Artificial Sequence
  Description of Artificial Sequence: Synthetic oligonucleotide
ttcaaccaaaatacacccga

SEQ ID NO: 1727 - DNA, 20 bp, Artificial Sequence
  Description of Artificial Sequence: Synthetic oligonucleotide
tcagcaacctctaactaacc

SEQ ID NO: 1728 - DNA, 20 bp, Artificial Sequence
  Description of Artificial Sequence: Synthetic oligonucleotide
tgagaaacaccaatttccga

SEQ ID NO: 1729 - DNA, 20 bp, Artificial Sequence
  Description of Artificial Sequence: Synthetic oligonucleotide
ttacaggagtacaaaccacc

SEQ ID NO: 1730 - DNA, 20 bp, Artificial Sequence
  Description of Artificial Sequence: Synthetic oligonucleotide
ctggtgtgtccagatagcta

SEQ ID NO: 1731 - DNA, 20 bp, Artificial Sequence
  Description of Artificial Sequence: Synthetic oligonucleotide
agcggcgacacgacagacat

SEQ ID NO: 1732 - DNA, 20 bp, Artificial Sequence
  Description of Artificial Sequence: Synthetic oligonucleotide
atgtccagatggcttacagg

SEQ ID NO: 1733 - DNA, 20 bp, Artificial Sequence
  Description of Artificial Sequence: Synthetic oligonucleotide
atagagtactcttccaccaa

SEQ ID NO: 1734 - DNA, 20 bp, Artificial Sequence
  Description of Artificial Sequence: Synthetic oligonucleotide
taaagcctataaatacaact

SEQ ID NO: 1735 - DNA, 20 bp, Artificial Sequence
  Description of Artificial Sequence: Synthetic oligonucleotide
ccagcagaaccatgtaaggg

SEQ ID NO: 1736 - DNA, 20 bp, Artificial Sequence
  Description of Artificial Sequence: Synthetic oligonucleotide
atggtctacgatatggagaa

SEQ ID NO: 1737 - DNA, 20 bp, Artificial Sequence
  Description of Artificial Sequence: Synthetic oligonucleotide
cagtgcccaaatgatgggtt

SEQ ID NO: 1738 - DNA, 20 bp, Artificial Sequence
  Description of Artificial Sequence: Synthetic oligonucleotide
accgagtcatcgtattcgag

SEQ ID NO: 1739 - DNA, 20 bp, Artificial Sequence
  Description of Artificial Sequence: Synthetic oligonucleotide
accaaacagcggagcaaacg

SEQ ID NO: 1740 - DNA, 20 bp, Artificial Sequence
  Description of Artificial Sequence: Synthetic oligonucleotide
taacgtgtagatgccattcg

SEQ ID NO: 1741 - DNA, 20 bp, Artificial Sequence
  Description of Artificial Sequence: Synthetic oligonucleotide
aagaactgaattattcaccg

SEQ ID NO: 1742 - DNA, 20 bp, Artificial Sequence
  Description of Artificial Sequence: Synthetic oligonucleotide
agggtaccacacatcaggtg

SEQ ID NO: 1743 - DNA, 20 bp, Artificial Sequence
  Description of Artificial Sequence: Synthetic oligonucleotide
ccttaaagacatcctgagcg

SEQ ID NO: 1744 - DNA, 20 bp, Artificial Sequence
  Description of Artificial Sequence: Synthetic oligonucleotide
ggacgcaacctctctcgggg

SEQ ID NO: 1745 - DNA, 20 bp, Artificial Sequence
  Description of Artificial Sequence: Synthetic oligonucleotide
tccagcttgatgcgagcgtg

SEQ ID NO: 1746 - DNA, 20 bp, Artificial Sequence
  Description of Artificial Sequence: Synthetic oligonucleotide
tcagggagtagcctccatct

SEQ ID NO: 1747 - DNA, 20 bp, Artificial Sequence
  Description of Artificial Sequence: Synthetic oligonucleotide
actcagggatctactatgtg

SEQ ID NO: 1748 - DNA, 20 bp, Artificial Sequence
  Description of Artificial Sequence: Synthetic oligonucleotide
gaccaatctgacatgctgca

SEQ ID NO: 1749 - DNA, 20 bp, Artificial Sequence
  Description of Artificial Sequence: Synthetic oligonucleotide
tggctgtatggtgacaagag

SEQ ID NO: 1750 - DNA, 20 bp, Artificial Sequence
  Description of Artificial Sequence: Synthetic oligonucleotide
cggcccggcagatacctgag

SEQ ID NO: 1751 - DNA, 20 bp, Artificial Sequence
  Description of Artificial Sequence: Synthetic oligonucleotide
aaccttagggaacctccaca

SEQ ID NO: 1752 - DNA, 20 bp, Artificial Sequence
  Description of Artificial Sequence: Synthetic oligonucleotide
gtcgctgtgtcccagaacat

SEQ ID NO: 1753 - DNA, 20 bp, Artificial Sequence
  Description of Artificial Sequence: Synthetic oligonucleotide
gacatggtctggatagttgg

SEQ ID NO: 1754 - DNA, 20 bp, Artificial Sequence
  Description of Artificial Sequence: Synthetic oligonucleotide
taagtcaggggaaacgattg

SEQ ID NO: 1755 - DNA, 20 bp, Artificial Sequence
  Description of Artificial Sequence: Synthetic oligonucleotide
cctgcgttctgaactcacgg

SEQ ID NO: 1756 - DNA, 20 bp, Artificial Sequence
  Description of Artificial Sequence: Synthetic oligonucleotide
gacttggtcgatgatcacca

SEQ ID NO: 1757 - DNA, 20 bp, Artificial Sequence
  Description of Artificial Sequence: Synthetic oligonucleotide
aaataatccgtcattcctag

SEQ ID NO: 1758 - DNA, 20 bp, Artificial Sequence
  Description of Artificial Sequence: Synthetic oligonucleotide
ctggcccgggaagcgcaagg

SEQ ID NO: 1759 - DNA, 20 bp, Artificial Sequence
  Description of Artificial Sequence: Synthetic oligonucleotide
catggacagtgtccgctcag

SEQ ID NO: 1760 - DNA, 20 bp, Artificial Sequence
  Description of Artificial Sequence: Synthetic oligonucleotide
cagctggtggatggacagcg

SEQ ID NO: 1761 - DNA, 20 bp, Artificial Sequence
  Description of Artificial Sequence: Synthetic oligonucleotide
ctgggccaagggtcactaca

SEQ ID NO: 1762 - DNA, 20 bp, Artificial Sequence
  Description of Artificial Sequence: Synthetic oligonucleotide
ggagaacgaccatatccgtg

SEQ ID NO: 1763 - DNA, 20 bp, Artificial Sequence
  Description of Artificial Sequence: Synthetic oligonucleotide
ttccgaaatttaccgcatgg

SEQ ID NO: 1764 - DNA, 20 bp, Artificial Sequence
  Description of Artificial Sequence: Synthetic oligonucleotide
ggtacaatgtgaaaggccga

SEQ ID NO: 1765 - DNA, 20 bp, Artificial Sequence
  Description of Artificial Sequence: Synthetic oligonucleotide
tgtggggaataagcccccaa

SEQ ID NO: 1766 - DNA, 20 bp, Artificial Sequence
  Description of Artificial Sequence: Synthetic oligonucleotide
gaccatgtggacattaggtg

SEQ ID NO: 1767 - DNA, 20 bp, Artificial Sequence
  Description of Artificial Sequence: Synthetic oligonucleotide
agacttctccacgaacacaa

SEQ ID NO: 1768 - DNA, 20 bp, Artificial Sequence
  Description of Artificial Sequence: Synthetic oligonucleotide
gccgaacaagcaaagaacag

SEQ ID NO: 1769 - DNA, 20 bp, Artificial Sequence
  Description of Artificial Sequence: Synthetic oligonucleotide
tgttgcagtaaagatcctaa

SEQ ID NO: 1770 - DNA, 20 bp, Artificial Sequence
  Description of Artificial Sequence: Synthetic oligonucleotide
ggtgtacgagagcccctacg

SEQ ID NO: 1771 - DNA, 20 bp, Artificial Sequence
  Description of Artificial Sequence: Synthetic oligonucleotide
cacaccactacaccatcgag

SEQ ID NO: 1772 - DNA, 20 bp, Artificial Sequence
  Description of Artificial Sequence: Synthetic oligonucleotide
atccgagccagagacaacaa

SEQ ID NO: 1773 - DNA, 20 bp, Artificial Sequence
  Description of Artificial Sequence: Synthetic oligonucleotide
taataactcatctttaagag

SEQ ID NO: 1774 - DNA, 20 bp, Artificial Sequence
  Description of Artificial Sequence: Synthetic oligonucleotide
tttgtcaccagagatatgcg

SEQ ID NO: 1775 - DNA, 20 bp, Artificial Sequence
  Description of Artificial Sequence: Synthetic oligonucleotide
cctgataaaaaggacatgca

SEQ ID NO: 1776 - DNA, 20 bp, Artificial Sequence
  Description of Artificial Sequence: Synthetic oligonucleotide
catgccaagtccctttcaag

SEQ ID NO: 1777 - DNA, 20 bp, Artificial Sequence
  Description of Artificial Sequence: Synthetic oligonucleotide
gattgccgtcaaattgtcag

SEQ ID NO: 1778 - DNA, 20 bp, Artificial Sequence
  Description of Artificial Sequence: Synthetic oligonucleotide
aactttaactgggaccactg

SEQ ID NO: 1779 - DNA, 20 bp, Artificial Sequence
  Description of Artificial Sequence: Synthetic oligonucleotide
agaggactgtcagcgctggt

SEQ ID NO: 1780 - DNA, 20 bp, Artificial Sequence
  Description of Artificial Sequence: Synthetic oligonucleotide
actggcacagaggatgggac

SEQ ID NO: 1781 - DNA, 20 bp, Artificial Sequence
  Description of Artificial Sequence: Synthetic oligonucleotide
aagcaccacaagacaaagcc

SEQ ID NO: 1782 - DNA, 20 bp, Artificial Sequence
  Description of Artificial Sequence: Synthetic oligonucleotide
ccagagtgtcaccacacggt

SEQ ID NO: 1783 - DNA, 20 bp, Artificial Sequence
  Description of Artificial Sequence: Synthetic oligonucleotide
tctcccgcaaggctgtaatg

SEQ ID NO: 1784 - DNA, 20 bp, Artificial Sequence
  Description of Artificial Sequence: Synthetic oligonucleotide
gcggttatagggggaagctg

SEQ ID NO: 1785 - DNA, 20 bp, Artificial Sequence
  Description of Artificial Sequence: Synthetic oligonucleotide
gctgactgatgagggcgagt

SEQ ID NO: 1786 - DNA, 20 bp, Artificial Sequence
  Description of Artificial Sequence: Synthetic oligonucleotide
actcgaaggtcacaaattcg

SEQ ID NO: 1787 - DNA, 20 bp, Artificial Sequence
  Description of Artificial Sequence: Synthetic oligonucleotide
attccacacagggtttagcg

SEQ ID NO: 1788 - DNA, 20 bp, Artificial Sequence
  Description of Artificial Sequence: Synthetic oligonucleotide
cgagtattacaatgtgccgg

SEQ ID NO: 1789 - DNA, 20 bp, Artificial Sequence
  Description of Artificial Sequence: Synthetic oligonucleotide
ctctacgggcttgtgcacca

SEQ ID NO: 1790 - DNA, 20 bp, Artificial Sequence
  Description of Artificial Sequence: Synthetic oligonucleotide
tgggtgcatagatccctgct

SEQ ID NO: 1791 - DNA, 20 bp, Artificial Sequence
  Description of Artificial Sequence: Synthetic oligonucleotide
tcatgaagaagctttgcgtg

SEQ ID NO: 1792 - DNA, 20 bp, Artificial Sequence
  Description of Artificial Sequence: Synthetic oligonucleotide
gtaacagtattgggtagatg

SEQ ID NO: 1793 - DNA, 20 bp, Artificial Sequence
  Description of Artificial Sequence: Synthetic oligonucleotide
tattatttccggatcactcc

SEQ ID NO: 1794 - DNA, 20 bp, Artificial Sequence
  Description of Artificial Sequence: Synthetic oligonucleotide
tgccccgaagacatgccctg

SEQ ID NO: 1795 - DNA, 20 bp, Artificial Sequence
  Description of Artificial Sequence: Synthetic oligonucleotide
gaggacaagtcagctgccag

SEQ ID NO: 1796 - DNA, 20 bp, Artificial Sequence
  Description of Artificial Sequence: Synthetic oligonucleotide
cggaccagaccacccagtgg

SEQ ID NO: 1797 - DNA, 20 bp, Artificial Sequence
  Description of Artificial Sequence: Synthetic oligonucleotide
cagcagcaccaggacggggt

SEQ ID NO: 1798 - DNA, 20 bp, Artificial Sequence
  Description of Artificial Sequence: Synthetic oligonucleotide
ggagctggtcaaatatccgg

SEQ ID NO: 1799 - DNA, 20 bp, Artificial Sequence
  Description of Artificial Sequence: Synthetic oligonucleotide
aaatgaccggggatctaagg

SEQ ID NO: 1800 - DNA, 20 bp, Artificial Sequence
  Description of Artificial Sequence: Synthetic oligonucleotide
tggccatgatgtttagtggg

SEQ ID NO: 1801 - DNA, 20 bp, Artificial Sequence
  Description of Artificial Sequence: Synthetic oligonucleotide
cacaaacagcacatctgccg

SEQ ID NO: 1802 - DNA, 20 bp, Artificial Sequence
  Description of Artificial Sequence: Synthetic oligonucleotide
gcttctggacgtcttcacgc

SEQ ID NO: 1803 - DNA, 20 bp, Artificial Sequence
  Description of Artificial Sequence: Synthetic oligonucleotide
ctgcggtcgcacctacccgg

SEQ ID NO: 1804 - DNA, 20 bp, Artificial Sequence
  Description of Artificial Sequence: Synthetic oligonucleotide
tgcgcgcgtggatcagcgac

SEQ ID NO: 1805 - DNA, 20 bp, Artificial Sequence
  Description of Artificial Sequence: Synthetic oligonucleotide
ccagacggagccgtaggcgc

SEQ ID NO: 1806 - DNA, 20 bp, Artificial Sequence
  Description of Artificial Sequence: Synthetic oligonucleotide
aaccaaagtcgaatatgacg

SEQ ID NO: 1807 - DNA, 20 bp, Artificial Sequence
  Description of Artificial Sequence: Synthetic oligonucleotide
cctgcctgaccattccacca

SEQ ID NO: 1808 - DNA, 20 bp, Artificial Sequence
  Description of Artificial Sequence: Synthetic oligonucleotide
agccaagcacaatttgccgt

SEQ ID NO: 1809 - DNA, 20 bp, Artificial Sequence
  Description of Artificial Sequence: Synthetic oligonucleotide
cgttgtcctcgaaaaagccg

SEQ ID NO: 1810 - DNA, 20 bp, Artificial Sequence
  Description of Artificial Sequence: Synthetic oligonucleotide
gctgaccacaccaacctacg

SEQ ID NO: 1811 - DNA, 20 bp, Artificial Sequence
  Description of Artificial Sequence: Synthetic oligonucleotide
ccccaccggcacctaccacg

SEQ ID NO: 1812 - DNA, 20 bp, Artificial Sequence
  Description of Artificial Sequence: Synthetic oligonucleotide
agatccaccaggatggcacg

SEQ ID NO: 1813 - DNA, 20 bp, Artificial Sequence
  Description of Artificial Sequence: Synthetic oligonucleotide
ctgcattccaggtcagtctg

SEQ ID NO: 1814 - DNA, 20 bp, Artificial Sequence
  Description of Artificial Sequence: Synthetic oligonucleotide
atttgagcgtattctctacg

SEQ ID NO: 1815 - DNA, 20 bp, Artificial Sequence
  Description of Artificial Sequence: Synthetic oligonucleotide
atagtcaaatatcccttcag

SEQ ID NO: 1816 - DNA, 20 bp, Artificial Sequence
  Description of Artificial Sequence: Synthetic oligonucleotide
gtaaatgtgcccattcagga

SEQ ID NO: 1817 - DNA, 20 bp, Artificial Sequence
  Description of Artificial Sequence: Synthetic oligonucleotide
gctgcagataagcatcagtg

SEQ ID NO: 1818 - DNA, 20 bp, Artificial Sequence
  Description of Artificial Sequence: Synthetic oligonucleotide
tgatgtcgatgggcttatcg

SEQ ID NO: 1819 - DNA, 20 bp, Artificial Sequence
  Description of Artificial Sequence: Synthetic oligonucleotide
agcgggaattgggattaacg

SEQ ID NO: 1820 - DNA, 20 bp, Artificial Sequence
  Description of Artificial Sequence: Synthetic oligonucleotide
aaatgtacgagcacttcaag

SEQ ID NO: 1821 - DNA, 20 bp, Artificial Sequence
  Description of Artificial Sequence: Synthetic oligonucleotide
aaggtgtaataatcaaacaa

SEQ ID NO: 1822 - DNA, 20 bp, Artificial Sequence
  Description of Artificial Sequence: Synthetic oligonucleotide
gtggacatgttggatccacg

SEQ ID NO: 1823 - DNA, 20 bp, Artificial Sequence
  Description of Artificial Sequence: Synthetic oligonucleotide
agcaagcaacagattgcacg

SEQ ID NO: 1824 - DNA, 20 bp, Artificial Sequence
  Description of Artificial Sequence: Synthetic oligonucleotide
acttatcgaagtacaggcag

SEQ ID NO: 1825 - DNA, 20 bp, Artificial Sequence
  Description of Artificial Sequence: Synthetic oligonucleotide
gatgacggtgtaaaagtgtg

SEQ ID NO: 1826 - DNA, 20 bp, Artificial Sequence
  Description of Artificial Sequence: Synthetic oligonucleotide
gatgtatcaacctagtgctg

SEQ ID NO: 1827 - DNA, 20 bp, Artificial Sequence
  Description of Artificial Sequence: Synthetic oligonucleotide
tacaacagatcgtgtaatga

SEQ ID NO: 1828 - DNA, 20 bp, Artificial Sequence
  Description of Artificial Sequence: Synthetic oligonucleotide
cctcctccaagcatcagtaa

SEQ ID NO: 1829 - DNA, 20 bp, Artificial Sequence
  Description of Artificial Sequence: Synthetic oligonucleotide
tcaaagagtccatcaaacac

SEQ ID NO: 1830 - DNA, 20 bp, Artificial Sequence
  Description of Artificial Sequence: Synthetic oligonucleotide
gacaccactgatgataccga

SEQ ID NO: 1831 - DNA, 20 bp, Artificial Sequence
  Description of Artificial Sequence: Synthetic oligonucleotide
gcgttatcatcctggtcgca

SEQ ID NO: 1832 - DNA, 20 bp, Artificial Sequence
  Description of Artificial Sequence: Synthetic oligonucleotide
agtgatcaagaaaagcgcga

SEQ ID NO: 1833 - DNA, 20 bp, Artificial Sequence
  Description of Artificial Sequence: Synthetic oligonucleotide
gctcaccataggccatctgg

SEQ ID NO: 1834 - DNA, 20 bp, Artificial Sequence
  Description of Artificial Sequence: Synthetic oligonucleotide
ataataaggccatgactacg

SEQ ID NO: 1835 - DNA, 20 bp, Artificial Sequence
  Description of Artificial Sequence: Synthetic oligonucleotide
gtatacagctttgatccagt

SEQ ID NO: 1836 - DNA, 20 bp, Artificial Sequence
  Description of Artificial Sequence: Synthetic oligonucleotide
tctgatactcgattgagtga

SEQ ID NO: 1837 - DNA, 20 bp, Artificial Sequence
  Description of Artificial Sequence: Synthetic oligonucleotide
ttaccctccgttgaaaacgt

SEQ ID NO: 1838 - DNA, 20 bp, Artificial Sequence
  Description of Artificial Sequence: Synthetic oligonucleotide
ccacgggcgcagttcaacca

SEQ ID NO: 1839 - DNA, 20 bp, Artificial Sequence
  Description of Artificial Sequence: Synthetic oligonucleotide
ttggtggtcccaataatgga

SEQ ID NO: 1840 - DNA, 20 bp, Artificial Sequence
  Description of Artificial Sequence: Synthetic oligonucleotide
ggcatccaaagattgcaaga

SEQ ID NO: 1841 - DNA, 20 bp, Artificial Sequence
  Description of Artificial Sequence: Synthetic oligonucleotide
tgcagagtacatttgaacag

SEQ ID NO: 1842 - DNA, 20 bp, Artificial Sequence
  Description of Artificial Sequence: Synthetic oligonucleotide
tgacgcggaggcgtattcgg

SEQ ID NO: 1843 - DNA, 20 bp, Artificial Sequence
  Description of Artificial Sequence: Synthetic oligonucleotide
actctccaggcttaacacag

SEQ ID NO: 1844 - DNA, 20 bp, Artificial Sequence
  Description of Artificial Sequence: Synthetic oligonucleotide
gtgtacaaattcctgcacca

SEQ ID NO: 1845 - DNA, 20 bp, Artificial Sequence
  Description of Artificial Sequence: Synthetic oligonucleotide
agctctcgaagactgctgtg

SEQ ID NO: 1846 - DNA, 20 bp, Artificial Sequence
  Description of Artificial Sequence: Synthetic oligonucleotide
tgacgtgcgaaaacaagatg

SEQ ID NO: 1847 - DNA, 20 bp, Artificial Sequence
  Description of Artificial Sequence: Synthetic oligonucleotide
gcccaggtcaccaattgtgg

SEQ ID NO: 1848 - DNA, 20 bp, Artificial Sequence
  Description of Artificial Sequence: Synthetic oligonucleotide
ctgtgtgagatggtcaagca

SEQ ID NO: 1849 - DNA, 20 bp, Artificial Sequence
  Description of Artificial Sequence: Synthetic oligonucleotide
gatgctttgatttatatgca

SEQ ID NO: 1850 - DNA, 20 bp, Artificial Sequence
  Description of Artificial Sequence: Synthetic oligonucleotide
gaggtagatctagactcacg

SEQ ID NO: 1851 - DNA, 20 bp, Artificial Sequence
  Description of Artificial Sequence: Synthetic oligonucleotide
ttgcacataggggaaaccgt

SEQ ID NO: 1852 - DNA, 20 bp, Artificial Sequence
  Description of Artificial Sequence: Synthetic oligonucleotide
ggtaactgtgcctattcgag

SEQ ID NO: 1853 - DNA, 20 bp, Artificial Sequence
  Description of Artificial Sequence: Synthetic oligonucleotide
tggtggccactggtacaagg

SEQ ID NO: 1854 - DNA, 20 bp, Artificial Sequence
  Description of Artificial Sequence: Synthetic oligonucleotide
atccagaccatgatcacaca

SEQ ID NO: 1855 - DNA, 20 bp, Artificial Sequence
  Description of Artificial Sequence: Synthetic oligonucleotide
caacctctcgtacatcggcg

SEQ ID NO: 1856 - DNA, 20 bp, Artificial Sequence
  Description of Artificial Sequence: Synthetic oligonucleotide
gctgaccttgagatcacagg

SEQ ID NO: 1857 - DNA, 20 bp, Artificial Sequence
  Description of Artificial Sequence: Synthetic oligonucleotide
cctactgccagagaaccctg

SEQ ID NO: 1858 - DNA, 20 bp, Artificial Sequence
  Description of Artificial Sequence: Synthetic oligonucleotide
tggcaatctcaagtcaacca

SEQ ID NO: 1859 - DNA, 20 bp, Artificial Sequence
  Description of Artificial Sequence: Synthetic oligonucleotide
tggtgacggacaggaacgag

SEQ ID NO: 1860 - DNA, 20 bp, Artificial Sequence
  Description of Artificial Sequence: Synthetic oligonucleotide
ccaccaaacctcaggtacgc

SEQ ID NO: 1861 - DNA, 20 bp, Artificial Sequence
  Description of Artificial Sequence: Synthetic oligonucleotide
taaaaatgtccaatacatca

SEQ ID NO: 1862 - DNA, 20 bp, Artificial Sequence
  Description of Artificial Sequence: Synthetic oligonucleotide
gctgggaaaagaacttcgag

SEQ ID NO: 1863 - DNA, 20 bp, Artificial Sequence
  Description of Artificial Sequence: Synthetic oligonucleotide
ccacagatgcaacataagct

SEQ ID NO: 1864 - DNA, 20 bp, Artificial Sequence
  Description of Artificial Sequence: Synthetic oligonucleotide
ttgggaaggacaccattccg

SEQ ID NO: 1865 - DNA, 20 bp, Artificial Sequence
  Description of Artificial Sequence: Synthetic oligonucleotide
cagggtgacgatgtcaactg

SEQ ID NO: 1866 - DNA, 20 bp, Artificial Sequence
  Description of Artificial Sequence: Synthetic oligonucleotide
tatgagtatgactttgaacg

SEQ ID NO: 1867 - DNA, 20 bp, Artificial Sequence
  Description of Artificial Sequence: Synthetic oligonucleotide
gatggtagttaatgagctca

SEQ ID NO: 1868 - DNA, 20 bp, Artificial Sequence
  Description of Artificial Sequence: Synthetic oligonucleotide
ataaggagttaccgtatccc

SEQ ID NO: 1869 - DNA, 20 bp, Artificial Sequence
  Description of Artificial Sequence: Synthetic oligonucleotide
ctgtgtttgctaaatccaca

SEQ ID NO: 1870 - DNA, 20 bp, Artificial Sequence
  Description of Artificial Sequence: Synthetic oligonucleotide
cttgacggagcaatgcacgt

SEQ ID NO: 1871 - DNA, 20 bp, Artificial Sequence
  Description of Artificial Sequence: Synthetic oligonucleotide
ccagcagtccatacttattg

SEQ ID NO: 1872 - DNA, 20 bp, Artificial Sequence
  Description of Artificial Sequence: Synthetic oligonucleotide
gatgtctggattgtaattgg

SEQ ID NO: 1873 - DNA, 20 bp, Artificial Sequence
  Description of Artificial Sequence: Synthetic oligonucleotide
gcgagcggcacgagtttgcg

SEQ ID NO: 1874 - DNA, 20 bp, Artificial Sequence
  Description of Artificial Sequence: Synthetic oligonucleotide
tgggcaagtataccacggtg

SEQ ID NO: 1875 - DNA, 20 bp, Artificial Sequence
  Description of Artificial Sequence: Synthetic oligonucleotide
gggctcagcatctcgaaagg

SEQ ID NO: 1876 - DNA, 20 bp, Artificial Sequence
  Description of Artificial Sequence: Synthetic oligonucleotide
aagcatggcttgtagacccg

SEQ ID NO: 1877 - DNA, 20 bp, Artificial Sequence
  Description of Artificial Sequence: Synthetic oligonucleotide
gctacagaagtgcttcgaag

SEQ ID NO: 1878 - DNA, 20 bp, Artificial Sequence
  Description of Artificial Sequence: Synthetic oligonucleotide
tgtcaacactaagagcgcag

SEQ ID NO: 1879 - DNA, 20 bp, Artificial Sequence
  Description of Artificial Sequence: Synthetic oligonucleotide
cacatagataaggtctccaa

SEQ ID NO: 1880 - DNA, 20 bp, Artificial Sequence
  Description of Artificial Sequence: Synthetic oligonucleotide
tgaagcgattggcttcgtca

SEQ ID NO: 1881 - DNA, 20 bp, Artificial Sequence
  Description of Artificial Sequence: Synthetic oligonucleotide
caacatctcacaagtcatga

SEQ ID NO: 1882 - DNA, 20 bp, Artificial Sequence
  Description of Artificial Sequence: Synthetic oligonucleotide
tccatcctgacgatcgacga

SEQ ID NO: 1883 - DNA, 20 bp, Artificial Sequence
  Description of Artificial Sequence: Synthetic oligonucleotide
gagctacaagggggagacca

SEQ ID NO: 1884 - DNA, 20 bp, Artificial Sequence
  Description of Artificial Sequence: Synthetic oligonucleotide
acaccgtgtttgacgcgaag

SEQ ID NO: 1885 - DNA, 20 bp, Artificial Sequence
  Description of Artificial Sequence: Synthetic oligonucleotide
aggatgcgggtgtgatcgcg

SEQ ID NO: 1886 - DNA, 20 bp, Artificial Sequence
  Description of Artificial Sequence: Synthetic oligonucleotide
atgcggtggtccttgagaaa

SEQ ID NO: 1887 - DNA, 20 bp, Artificial Sequence
  Description of Artificial Sequence: Synthetic oligonucleotide
gaacataaaaagcattcgtc

SEQ ID NO: 1888 - DNA, 20 bp, Artificial Sequence
  Description of Artificial Sequence: Synthetic oligonucleotide
gctgcgcctgcaccccggag

SEQ ID NO: 1889 - DNA, 20 bp, Artificial Sequence
  Description of Artificial Sequence: Synthetic oligonucleotide
caagtctggctcgttctcag

SEQ ID NO: 1890 - DNA, 20 bp, Artificial Sequence
  Description of Artificial Sequence: Synthetic oligonucleotide
tgttgctgaaggttcaacac

SEQ ID NO: 1891 - DNA, 20 bp, Artificial Sequence
  Description of Artificial Sequence: Synthetic oligonucleotide
ggggcactgttatctgcacg

SEQ ID NO: 1892 - DNA, 20 bp, Artificial Sequence
  Description of Artificial Sequence: Synthetic oligonucleotide
aagagagctacagtcgttag

SEQ ID NO: 1893 - DNA, 20 bp, Artificial Sequence
  Description of Artificial Sequence: Synthetic oligonucleotide
aattaagaatcatagggaag

SEQ ID NO: 1894 - DNA, 20 bp, Artificial Sequence
  Description of Artificial Sequence: Synthetic oligonucleotide
acccaaagcgctaattcaca

SEQ ID NO: 1895 - DNA, 20 bp, Artificial Sequence
  Description of Artificial Sequence: Synthetic oligonucleotide
aatattaggatggttcacac

SEQ ID NO: 1896 - DNA, 20 bp, Artificial Sequence
  Description of Artificial Sequence: Synthetic oligonucleotide
cccagctttccgaatcatgt

SEQ ID NO: 1897 - DNA, 20 bp, Artificial Sequence
  Description of Artificial Sequence: Synthetic oligonucleotide
cacacatgaccaataacaag

SEQ ID NO: 1898 - DNA, 20 bp, Artificial Sequence
  Description of Artificial Sequence: Synthetic oligonucleotide
ccggaagtagccatctacca

SEQ ID NO: 1899 - DNA, 20 bp, Artificial Sequence
  Description of Artificial Sequence: Synthetic oligonucleotide
gcctagacagcaccgtaatg

SEQ ID NO: 1900 - DNA, 20 bp, Artificial Sequence
  Description of Artificial Sequence: Synthetic oligonucleotide
tggtttcattcgaatgacgg

SEQ ID NO: 1901 - DNA, 20 bp, Artificial Sequence
  Description of Artificial Sequence: Synthetic oligonucleotide
cacacttactctccacgtcg

SEQ ID NO: 1902 - DNA, 20 bp, Artificial Sequence
  Description of Artificial Sequence: Synthetic oligonucleotide
cgatgcctattactgcactg

SEQ ID NO: 1903 - DNA, 20 bp, Artificial Sequence
  Description of Artificial Sequence: Synthetic oligonucleotide
taccgatcaccgtacccaca

SEQ ID NO: 1904 - DNA, 20 bp, Artificial Sequence
  Description of Artificial Sequence: Synthetic oligonucleotide
agctaggcatgattgaccgc

SEQ ID NO: 1905 - DNA, 20 bp, Artificial Sequence
  Description of Artificial Sequence: Synthetic oligonucleotide
ggccatgattgagaaactcg

SEQ ID NO: 1906 - DNA, 20 bp, Artificial Sequence
  Description of Artificial Sequence: Synthetic oligonucleotide
tagaaaaaactgttcgacca

SEQ ID NO: 1907 - DNA, 20 bp, Artificial Sequence
  Description of Artificial Sequence: Synthetic oligonucleotide
catcgaactctgcacccctg

SEQ ID NO: 1908 - DNA, 20 bp, Artificial Sequence
  Description of Artificial Sequence: Synthetic oligonucleotide
atcaacaggtctgatctcca

SEQ ID NO: 1909 - DNA, 20 bp, Artificial Sequence
  Description of Artificial Sequence: Synthetic oligonucleotide
ctttaagtctgtttcccccg

SEQ ID NO: 1910 - DNA, 20 bp, Artificial Sequence
  Description of Artificial Sequence: Synthetic oligonucleotide
caaattcggtacatcctcga

SEQ ID NO: 1911 - DNA, 20 bp, Artificial Sequence
  Description of Artificial Sequence: Synthetic oligonucleotide
tgcctggtgaaaatcatcac

SEQ ID NO: 1912 - DNA, 20 bp, Artificial Sequence
  Description of Artificial Sequence: Synthetic oligonucleotide
tttgtcaattcgttctgaag

SEQ ID NO: 1913 - DNA, 20 bp, Artificial Sequence
  Description of Artificial Sequence: Synthetic oligonucleotide
tactctcaaatctgttctgg

SEQ ID NO: 1914 - DNA, 20 bp, Artificial Sequence
  Description of Artificial Sequence: Synthetic oligonucleotide
gccccgcagagcgtccatcg

SEQ ID NO: 1915 - DNA, 20 bp, Artificial Sequence
  Description of Artificial Sequence: Synthetic oligonucleotide
ggtgctggatcacagactcg

SEQ ID NO: 1916 - DNA, 20 bp, Artificial Sequence
  Description of Artificial Sequence: Synthetic oligonucleotide
acccacctaacatttccagg

SEQ ID NO: 1917 - DNA, 20 bp, Artificial Sequence
  Description of Artificial Sequence: Synthetic oligonucleotide
cagccggggtagcagcactt

SEQ ID NO: 1918 - DNA, 20 bp, Artificial Sequence
  Description of Artificial Sequence: Synthetic oligonucleotide
gctggttcatatcttgaaca

SEQ ID NO: 1919 - DNA, 20 bp, Artificial Sequence
  Description of Artificial Sequence: Synthetic oligonucleotide
gccatggagtactgccaagg

SEQ ID NO: 1920 - DNA, 20 bp, Artificial Sequence
  Description of Artificial Sequence: Synthetic oligonucleotide
tttgcaggcattcaaaagtg

SEQ ID NO: 1921 - DNA, 20 bp, Artificial Sequence
  Description of Artificial Sequence: Synthetic oligonucleotide
tgagggccacacattggaca

SEQ ID NO: 1922 - DNA, 20 bp, Artificial Sequence
  Description of Artificial Sequence: Synthetic oligonucleotide
gtgaagaattccatccacgt

SEQ ID NO: 1923 - DNA, 20 bp, Artificial Sequence
  Description of Artificial Sequence: Synthetic oligonucleotide
tccggcttatactcccagcg

SEQ ID NO: 1924 - DNA, 20 bp, Artificial Sequence
  Description of Artificial Sequence: Synthetic oligonucleotide
cgataaaggtcccacacgtg

SEQ ID NO: 1925 - DNA, 20 bp, Artificial Sequence
  Description of Artificial Sequence: Synthetic oligonucleotide
ggtgtggccggcagactacg

SEQ ID NO: 1926 - DNA, 20 bp, Artificial Sequence
  Description of Artificial Sequence: Synthetic oligonucleotide
ctaggaggaagacaatgtgt

SEQ ID NO: 1927 - DNA, 20 bp, Artificial Sequence
  Description of Artificial Sequence: Synthetic oligonucleotide
agatgaacagcgcacagcca

SEQ ID NO: 1928 - DNA, 20 bp, Artificial Sequence
  Description of Artificial Sequence: Synthetic oligonucleotide
attctggaatatgctccaag

SEQ ID NO: 1929 - DNA, 20 bp, Artificial Sequence
  Description of Artificial Sequence: Synthetic oligonucleotide
ggaaatagttatacaggcgc

SEQ ID NO: 1930 - DNA, 20 bp, Artificial Sequence
  Description of Artificial Sequence: Synthetic oligonucleotide
ccagctgcaatacctacaca

SEQ ID NO: 1931 - DNA, 20 bp, Artificial Sequence
  Description of Artificial Sequence: Synthetic oligonucleotide
accactctctctacgcatag

SEQ ID NO: 1932 - DNA, 20 bp, Artificial Sequence
  Description of Artificial Sequence: Synthetic oligonucleotide
acagtggtaggtatctcagg

SEQ ID NO: 1933 - DNA, 20 bp, Artificial Sequence
  Description of Artificial Sequence: Synthetic oligonucleotide
cttgttgtaaatgtaacagt

SEQ ID NO: 1934 - DNA, 20 bp, Artificial Sequence
  Description of Artificial Sequence: Synthetic oligonucleotide
tacaccccagtctaccgcag

SEQ ID NO: 1935 - DNA, 20 bp, Artificial Sequence
  Description of Artificial Sequence: Synthetic oligonucleotide
ctgggctggaaagacatatg

SEQ ID NO: 1936 - DNA, 20 bp, Artificial Sequence
  Description of Artificial Sequence: Synthetic oligonucleotide
tggtgatgccataccatgtg

SEQ ID NO: 1937 - DNA, 20 bp, Artificial Sequence
  Description of Artificial Sequence: Synthetic oligonucleotide
gtgcacaccatacctccatg

SEQ ID NO: 1938 - DNA, 20 bp, Artificial Sequence
  Description of Artificial Sequence: Synthetic oligonucleotide
caagatgtgccaattctgcg

SEQ ID NO: 1939 - DNA, 20 bp, Artificial Sequence
  Description of Artificial Sequence: Synthetic oligonucleotide
tgtgcgcagtaaccccaaca

SEQ ID NO: 1940 - DNA, 20 bp, Artificial Sequence
  Description of Artificial Sequence: Synthetic oligonucleotide
cagcggctgccggaacactg

SEQ ID NO: 1941 - DNA, 20 bp, Artificial Sequence
  Description of Artificial Sequence: Synthetic oligonucleotide
tgatggcgaaggagcctacg

SEQ ID NO: 1942 - DNA, 20 bp, Artificial Sequence
  Description of Artificial Sequence: Synthetic oligonucleotide
tatacaagctattagctgcg

SEQ ID NO: 1943 - DNA, 20 bp, Artificial Sequence
  Description of Artificial Sequence: Synthetic oligonucleotide
tttgtcatataaccttctgg

SEQ ID NO: 1944 - DNA, 20 bp, Artificial Sequence
  Description of Artificial Sequence: Synthetic oligonucleotide
gacacctggatctttcacat

SEQ ID NO: 1945 - DNA, 20 bp, Artificial Sequence
  Description of Artificial Sequence: Synthetic oligonucleotide
tacccccttgactattgaca

SEQ ID NO: 1946 - DNA, 20 bp, Artificial Sequence
  Description of Artificial Sequence: Synthetic oligonucleotide
cctacattagtcaactgcca

SEQ ID NO: 1947 - DNA, 20 bp, Artificial Sequence
  Description of Artificial Sequence: Synthetic oligonucleotide
ggtactctacaacagacacg

SEQ ID NO: 1948 - DNA, 20 bp, Artificial Sequence
  Description of Artificial Sequence: Synthetic oligonucleotide
tggtgctgtgctgctaactc

SEQ ID NO: 1949 - DNA, 20 bp, Artificial Sequence
  Description of Artificial Sequence: Synthetic oligonucleotide
gatattcaggacttactgag

SEQ ID NO: 1950 - DNA, 20 bp, Artificial Sequence
  Description of Artificial Sequence: Synthetic oligonucleotide
tgtcgcagaggggctacgag

SEQ ID NO: 1951 - DNA, 20 bp, Artificial Sequence
  Description of Artificial Sequence: Synthetic oligonucleotide
ctgacgcccttcaccgcgcg

SEQ ID NO: 1952 - DNA, 20 bp, Artificial Sequence
  Description of Artificial Sequence: Synthetic oligonucleotide
ggccttctttgagttcggtg

SEQ ID NO: 1953 - DNA, 20 bp, Artificial Sequence
  Description of Artificial Sequence: Synthetic oligonucleotide
tggacatctcggcgaagtcg

SEQ ID NO: 1954 - DNA, 20 bp, Artificial Sequence
  Description of Artificial Sequence: Synthetic oligonucleotide
atactttgaagatcgtcatg

SEQ ID NO: 1955 - DNA, 20 bp, Artificial Sequence
  Description of Artificial Sequence: Synthetic oligonucleotide
aactatcaccaacataatgg

SEQ ID NO: 1956 - DNA, 20 bp, Artificial Sequence
  Description of Artificial Sequence: Synthetic oligonucleotide
atcctcaggaactcgcactg

SEQ ID NO: 1957 - DNA, 20 bp, Artificial Sequence
  Description of Artificial Sequence: Synthetic oligonucleotide
ggaaggggctatgtcagaag

SEQ ID NO: 1958 - DNA, 20 bp, Artificial Sequence
  Description of Artificial Sequence: Synthetic oligonucleotide
gacaaaacacaatcccctgt

SEQ ID NO: 1959 - DNA, 20 bp, Artificial Sequence
  Description of Artificial Sequence: Synthetic oligonucleotide
gtattccaaaagctctggca

SEQ ID NO: 1960 - DNA, 20 bp, Artificial Sequence
  Description of Artificial Sequence: Synthetic oligonucleotide
acccttatacacaactccat

SEQ ID NO: 1961 - DNA, 20 bp, Artificial Sequence
  Description of Artificial Sequence: Synthetic oligonucleotide
gatctccagaagtattgctg

SEQ ID NO: 1962 - DNA, 20 bp, Artificial Sequence
  Description of Artificial Sequence: Synthetic oligonucleotide
ccgatcgcacacatttgtcg

SEQ ID NO: 1963 - DNA, 20 bp, Artificial Sequence
  Description of Artificial Sequence: Synthetic oligonucleotide
agctgtggcagcgtcaacag

SEQ ID NO: 1964 - DNA, 20 bp, Artificial Sequence
  Description of Artificial Sequence: Synthetic oligonucleotide
ctcactgatatcgaatgcaa

SEQ ID NO: 1965 - DNA, 20 bp, Artificial Sequence
  Description of Artificial Sequence: Synthetic oligonucleotide
tactgtattgtgttgtcccg

SEQ ID NO: 1966 - DNA, 20 bp, Artificial Sequence
  Description of Artificial Sequence: Synthetic oligonucleotide
atcctgatagacctacgccg

SEQ ID NO: 1967 - DNA, 20 bp, Artificial Sequence
  Description of Artificial Sequence: Synthetic oligonucleotide
atagcagtgcgacttcgagt

SEQ ID NO: 1968 - DNA, 20 bp, Artificial Sequence
  Description of Artificial Sequence: Synthetic oligonucleotide
caagcaggcggatcacgcca

SEQ ID NO: 1969 - DNA, 20 bp, Artificial Sequence
  Description of Artificial Sequence: Synthetic oligonucleotide
tgtcacgatggacaactcca

SEQ ID NO: 1970 - DNA, 20 bp, Artificial Sequence
  Description of Artificial Sequence: Synthetic oligonucleotide
tccacgttatgatttagacg

SEQ ID NO: 1971 - DNA, 20 bp, Artificial Sequence
  Description of Artificial Sequence: Synthetic oligonucleotide
acagtgtataaactcccaca

SEQ ID NO: 1972 - DNA, 20 bp, Artificial Sequence
  Description of Artificial Sequence: Synthetic oligonucleotide
aatcaagaacttatctacga

SEQ ID NO: 1973 - DNA, 20 bp, Artificial Sequence
  Description of Artificial Sequence: Synthetic oligonucleotide
agttgatctttggagcattg

SEQ ID NO: 1974 - DNA, 20 bp, Artificial Sequence
  Description of Artificial Sequence: Synthetic oligonucleotide
catgggtgtaagtacgaaca

SEQ ID NO: 1975 - DNA, 20 bp, Artificial Sequence
  Description of Artificial Sequence: Synthetic oligonucleotide
caaatattattccacagctg

SEQ ID NO: 1976 - DNA, 20 bp, Artificial Sequence
  Description of Artificial Sequence: Synthetic oligonucleotide
tctgaggtttaaggtctcgg

SEQ ID NO: 1977 - DNA, 20 bp, Artificial Sequence
  Description of Artificial Sequence: Synthetic oligonucleotide
aagcagagagatctctcgga

SEQ ID NO: 1978 - DNA, 20 bp, Artificial Sequence
  Description of Artificial Sequence: Synthetic oligonucleotide
catcgttaaaaatgccccag

SEQ ID NO: 1979 - DNA, 20 bp, Artificial Sequence
  Description of Artificial Sequence: Synthetic oligonucleotide
atttaagcgggaactgtccg

SEQ ID NO: 1980 - DNA, 20 bp, Artificial Sequence
  Description of Artificial Sequence: Synthetic oligonucleotide
tcttactgaattgtccgact

SEQ ID NO: 1981 - DNA, 20 bp, Artificial Sequence
  Description of Artificial Sequence: Synthetic oligonucleotide
aacttatcgactatcaactt

SEQ ID NO: 1982 - DNA, 20 bp, Artificial Sequence
  Description of Artificial Sequence: Synthetic oligonucleotide
cacatcgtcgtgtaccatcg

SEQ ID NO: 1983 - DNA, 20 bp, Artificial Sequence
  Description of Artificial Sequence: Synthetic oligonucleotide
gctcagtgaacatccacccg

SEQ ID NO: 1984 - DNA, 20 bp, Artificial Sequence
  Description of Artificial Sequence: Synthetic oligonucleotide
tacgccaaatctctactaca

SEQ ID NO: 1985 - DNA, 20 bp, Artificial Sequence
  Description of Artificial Sequence: Synthetic oligonucleotide
acatctacctccgaggacga

SEQ ID NO: 1986 - DNA, 20 bp, Artificial Sequence
  Description of Artificial Sequence: Synthetic oligonucleotide
gaccaaggcattctaccccg

SEQ ID NO: 1987 - DNA, 20 bp, Artificial Sequence
  Description of Artificial Sequence: Synthetic oligonucleotide
ccgcaagttcggcgacccgg

SEQ ID NO: 1988 - DNA, 20 bp, Artificial Sequence
  Description of Artificial Sequence: Synthetic oligonucleotide
gccgtcgtcgatcgtcagga

SEQ ID NO: 1989 - DNA, 20 bp, Artificial Sequence
  Description of Artificial Sequence: Synthetic oligonucleotide
ctgctgcaggacttcttcaa

SEQ ID NO: 1990 - DNA, 20 bp, Artificial Sequence
  Description of Artificial Sequence: Synthetic oligonucleotide
cgcaaacggtgcgcaccgcg

SEQ ID NO: 1991 - DNA, 20 bp, Artificial Sequence
  Description of Artificial Sequence: Synthetic oligonucleotide
ggtacttggaaaaatggaca

SEQ ID NO: 1992 - DNA, 20 bp, Artificial Sequence
  Description of Artificial Sequence: Synthetic oligonucleotide
ctgcacgaaataaagctcct

SEQ ID NO: 1993 - DNA, 20 bp, Artificial Sequence
  Description of Artificial Sequence: Synthetic oligonucleotide
actcttcgatagcctcgggc

SEQ ID NO: 1994 - DNA, 20 bp, Artificial Sequence
  Description of Artificial Sequence: Synthetic oligonucleotide
tggtttcggaggcccgaccg

SEQ ID NO: 1995 - DNA, 20 bp, Artificial Sequence
  Description of Artificial Sequence: Synthetic oligonucleotide
ggagggcagaatcatcacga

SEQ ID NO: 1996 - DNA, 20 bp, Artificial Sequence
  Description of Artificial Sequence: Synthetic oligonucleotide
ggaggaagagtagctcgccg

SEQ ID NO: 1997 - DNA, 20 bp, Artificial Sequence
  Description of Artificial Sequence: Synthetic oligonucleotide
agatgtactcgatctcatca

SEQ ID NO: 1998 - DNA, 20 bp, Artificial Sequence
  Description of Artificial Sequence: Synthetic oligonucleotide
gttcgaacaggtatctacca

SEQ ID NO: 1999 - DNA, 20 bp, Artificial Sequence
  Description of Artificial Sequence: Synthetic oligonucleotide
aacctcgaaccataggatct

SEQ ID NO: 2000 - DNA, 20 bp, Artificial Sequence
  Description of Artificial Sequence: Synthetic oligonucleotide
ggatttagctattcccacgc

SEQ ID NO: 2001 - DNA, 20 bp, Artificial Sequence
  Description of Artificial Sequence: Synthetic oligonucleotide
gaagctgtataatgcttggg

SEQ ID NO: 2002 - DNA, 20 bp, Artificial Sequence
  Description of Artificial Sequence: Synthetic oligonucleotide
gggctctagtataataggag

SEQ ID NO: 2003 - DNA, 20 bp, Artificial Sequence
  Description of Artificial Sequence: Synthetic oligonucleotide
gtggcatacatcatcagacc

SEQ ID NO: 2004 - DNA, 20 bp, Artificial Sequence
  Description of Artificial Sequence: Synthetic oligonucleotide
tcaagacagatcataagcga

SEQ ID NO: 2005 - DNA, 20 bp, Artificial Sequence
  Description of Artificial Sequence: Synthetic oligonucleotide
agtataagtgcgattgtacc

SEQ ID NO: 2006 - DNA, 20 bp, Artificial Sequence
  Description of Artificial Sequence: Synthetic oligonucleotide
cataccaataatgcagagtg

SEQ ID NO: 2007 - DNA, 20 bp, Artificial Sequence
  Description of Artificial Sequence: Synthetic oligonucleotide
ctgcccatccacactaggca

SEQ ID NO: 2008 - DNA, 20 bp, Artificial Sequence
  Description of Artificial Sequence: Synthetic oligonucleotide
ggtgcagtaccggactgact

SEQ ID NO: 2009 - DNA, 20 bp, Artificial Sequence
  Description of Artificial Sequence: Synthetic oligonucleotide
catatctccagtgatcccct

SEQ ID NO: 2010 - DNA, 20 bp, Artificial Sequence
  Description of Artificial Sequence: Synthetic oligonucleotide
cgaggaagtgggcttaaagg

SEQ ID NO: 2011 - DNA, 20 bp, Artificial Sequence
  Description of Artificial Sequence: Synthetic oligonucleotide
acaggcaatccgaacgtcca

SEQ ID NO: 2012 - DNA, 20 bp, Artificial Sequence
  Description of Artificial Sequence: Synthetic oligonucleotide
gctgcacttcgagatttcca

SEQ ID NO: 2013 - DNA, 20 bp, Artificial Sequence
  Description of Artificial Sequence: Synthetic oligonucleotide
gcgatcagaaagcttcatgt

SEQ ID NO: 2014 - DNA, 20 bp, Artificial Sequence
  Description of Artificial Sequence: Synthetic oligonucleotide
ctgccactgcaataccaacg

SEQ ID NO: 2015 - DNA, 20 bp, Artificial Sequence
  Description of Artificial Sequence: Synthetic oligonucleotide
aatgaagagtacaacctcag

SEQ ID NO: 2016 - DNA, 20 bp, Artificial Sequence
  Description of Artificial Sequence: Synthetic oligonucleotide
agaaaacgatcaaaccccac

SEQ ID NO: 2017 - DNA, 20 bp, Artificial Sequence
  Description of Artificial Sequence: Synthetic oligonucleotide
tcttcaggagagaataccat

SEQ ID NO: 2018 - DNA, 20 bp, Artificial Sequence
  Description of Artificial Sequence: Synthetic oligonucleotide
cattatcacggagtactgtg

SEQ ID NO: 2019 - DNA, 20 bp, Artificial Sequence
  Description of Artificial Sequence: Synthetic oligonucleotide
ccaaggctatgacacaaagt

SEQ ID NO: 2020 - DNA, 20 bp, Artificial Sequence
  Description of Artificial Sequence: Synthetic oligonucleotide
gagttgactacatgcatgag

SEQ ID NO: 2021 - DNA, 20 bp, Artificial Sequence
  Description of Artificial Sequence: Synthetic oligonucleotide
tcagacaagaaagccaaacg

SEQ ID NO: 2022 - DNA, 20 bp, Artificial Sequence
  Description of Artificial Sequence: Synthetic oligonucleotide
gtcttcgggaagtacctgag

SEQ ID NO: 2023 - DNA, 20 bp, Artificial Sequence
  Description of Artificial Sequence: Synthetic oligonucleotide
gcagagcagtccatctaagg

SEQ ID NO: 2024 - DNA, 20 bp, Artificial Sequence
  Description of Artificial Sequence: Synthetic oligonucleotide
tggccttcacaaccaaagca

SEQ ID NO: 2025 - DNA, 20 bp, Artificial Sequence
  Description of Artificial Sequence: Synthetic oligonucleotide
agctaggtcatactctccag

SEQ ID NO: 2026 - DNA, 20 bp, Artificial Sequence
  Description of Artificial Sequence: Synthetic oligonucleotide
ctgtgccggaagtactacct

SEQ ID NO: 2027 - DNA, 20 bp, Artificial Sequence
  Description of Artificial Sequence: Synthetic oligonucleotide
cctggagcgagtgtccaatg

SEQ ID NO: 2028 - DNA, 20 bp, Artificial Sequence
  Description of Artificial Sequence: Synthetic oligonucleotide
acagaacagagccaaatcaa

SEQ ID NO: 2029 - DNA, 20 bp, Artificial Sequence
  Description of Artificial Sequence: Synthetic oligonucleotide
tgagcactatcacccagaag

SEQ ID NO: 2030 - DNA, 20 bp, Artificial Sequence
  Description of Artificial Sequence: Synthetic oligonucleotide
gttctcagaaacgatcaaca

SEQ ID NO: 2031 - DNA, 20 bp, Artificial Sequence
  Description of Artificial Sequence: Synthetic oligonucleotide
ctccataatccggaccacaa

SEQ ID NO: 2032 - DNA, 20 bp, Artificial Sequence
  Description of Artificial Sequence: Synthetic oligonucleotide
gcacatcatcatgcaccgtg

SEQ ID NO: 2033 - DNA, 20 bp, Artificial Sequence
  Description of Artificial Sequence: Synthetic oligonucleotide
gcaacatcagaatactatgg

SEQ ID NO: 2034 - DNA, 20 bp, Artificial Sequence
  Description of Artificial Sequence: Synthetic oligonucleotide
cttaaggtcattgcagacgt

SEQ ID NO: 2035 - DNA, 20 bp, Artificial Sequence
  Description of Artificial Sequence: Synthetic oligonucleotide
cagagcactggaattcgtca

SEQ ID NO: 2036 - DNA, 20 bp, Artificial Sequence
  Description of Artificial Sequence: Synthetic oligonucleotide
gacaacggctcagacgagca

SEQ ID NO: 2037 - DNA, 20 bp, Artificial Sequence
  Description of Artificial Sequence: Synthetic oligonucleotide
atgaacaggatccaccacga

SEQ ID NO: 2038 - DNA, 20 bp, Artificial Sequence
  Description of Artificial Sequence: Synthetic oligonucleotide
cgagttgaactgaacccgtg

SEQ ID NO: 2039 - DNA, 20 bp, Artificial Sequence
  Description of Artificial Sequence: Synthetic oligonucleotide
aggggacttcagaagctacg

SEQ ID NO: 2040 - DNA, 20 bp, Artificial Sequence
  Description of Artificial Sequence: Synthetic oligonucleotide
agcttggattgagtcaacag

SEQ ID NO: 2041 - DNA, 20 bp, Artificial Sequence
  Description of Artificial Sequence: Synthetic oligonucleotide
gtgaccgagttcatgtgtca

SEQ ID NO: 2042 - DNA, 20 bp, Artificial Sequence
  Description of Artificial Sequence: Synthetic oligonucleotide
gggagcgaatcgccaacacg

SEQ ID NO: 2043 - DNA, 20 bp, Artificial Sequence
  Description of Artificial Sequence: Synthetic oligonucleotide
gctggaggactcatccaagg

SEQ ID NO: 2044 - DNA, 20 bp, Artificial Sequence
  Description of Artificial Sequence: Synthetic oligonucleotide
gcagcaggtctacaaccact

SEQ ID NO: 2045 - DNA, 20 bp, Artificial Sequence
  Description of Artificial Sequence: Synthetic oligonucleotide
tcagaccgtgtctcagacgg

SEQ ID NO: 2046 - DNA, 20 bp, Artificial Sequence
  Description of Artificial Sequence: Synthetic oligonucleotide
tagcgcgtattgtacagcat

SEQ ID NO: 2047 - DNA, 20 bp, Artificial Sequence
  Description of Artificial Sequence: Synthetic oligonucleotide
cctgatcgtcagcctcgcag

SEQ ID NO: 2048 - DNA, 20 bp, Artificial Sequence
  Description of Artificial Sequence: Synthetic oligonucleotide
ctcttcggactcaataacgc

SEQ ID NO: 2049 - DNA, 20 bp, Artificial Sequence
  Description of Artificial Sequence: Synthetic oligonucleotide
gtggcatagtagttgtagtg

SEQ ID NO: 2050 - DNA, 20 bp, Artificial Sequence
  Description of Artificial Sequence: Synthetic oligonucleotide
gctccacactaaatccgcag

SEQ ID NO: 2051 - DNA, 20 bp, Artificial Sequence
  Description of Artificial Sequence: Synthetic oligonucleotide
ccttgaccgagtgaaactca

SEQ ID NO: 2052 - DNA, 20 bp, Artificial Sequence
  Description of Artificial Sequence: Synthetic oligonucleotide
aggaaggaaacatggaactc

SEQ ID NO: 2053 - DNA, 20 bp, Artificial Sequence
  Description of Artificial Sequence: Synthetic oligonucleotide
aggtggggcttccgtaagtg

SEQ ID NO: 2054 - DNA, 20 bp, Artificial Sequence
  Description of Artificial Sequence: Synthetic oligonucleotide
gtggctggggtaagtcaacg

SEQ ID NO: 2055 - DNA, 20 bp, Artificial Sequence
  Description of Artificial Sequence: Synthetic oligonucleotide
gcacaatggagccttccgtg

SEQ ID NO: 2056 - DNA, 20 bp, Artificial Sequence
  Description of Artificial Sequence: Synthetic oligonucleotide
cttggtttgggaatcaactg

SEQ ID NO: 2057 - DNA, 20 bp, Artificial Sequence
  Description of Artificial Sequence: Synthetic oligonucleotide
tagcccataatatcttcaca

SEQ ID NO: 2058 - DNA, 20 bp, Artificial Sequence
  Description of Artificial Sequence: Synthetic oligonucleotide
gatgcccaggctgacaacaa

SEQ ID NO: 2059 - DNA, 20 bp, Artificial Sequence
  Description of Artificial Sequence: Synthetic oligonucleotide
atggcgcacatgacaaccag

SEQ ID NO: 2060 - DNA, 20 bp, Artificial Sequence
  Description of Artificial Sequence: Synthetic oligonucleotide
gacatttctgtggtactctg

SEQ ID NO: 2061 - DNA, 20 bp, Artificial Sequence
  Description of Artificial Sequence: Synthetic oligonucleotide
attggactctgcgccatagt

SEQ ID NO: 2062 - DNA, 20 bp, Artificial Sequence
  Description of Artificial Sequence: Synthetic oligonucleotide
cacacgctagtggaccccga

SEQ ID NO: 2063 - DNA, 20 bp, Artificial Sequence
  Description of Artificial Sequence: Synthetic oligonucleotide
gtgacaccacacagaaacca

SEQ ID NO: 2064 - DNA, 20 bp, Artificial Sequence
  Description of Artificial Sequence: Synthetic oligonucleotide
ctcacgcagacggtgctctg

SEQ ID NO: 2065 - DNA, 20 bp, Artificial Sequence
  Description of Artificial Sequence: Synthetic oligonucleotide
ggcccgcacacgcagcacga

SEQ ID NO: 2066 - DNA, 20 bp, Artificial Sequence
  Description of Artificial Sequence: Synthetic oligonucleotide
agtcagatgcagacgcagtg

SEQ ID NO: 2067 - DNA, 20 bp, Artificial Sequence
  Description of Artificial Sequence: Synthetic oligonucleotide
aggatttgactcagccatcg

SEQ ID NO: 2068 - DNA, 20 bp, Artificial Sequence
  Description of Artificial Sequence: Synthetic oligonucleotide
ccgcagccctggatcgcctg

SEQ ID NO: 2069 - DNA, 20 bp, Artificial Sequence
  Description of Artificial Sequence: Synthetic oligonucleotide
gacaacgccggatatcacat

SEQ ID NO: 2070 - DNA, 20 bp, Artificial Sequence
  Description of Artificial Sequence: Synthetic oligonucleotide
tgacgtggagtgcactatgg

SEQ ID NO: 2071 - DNA, 20 bp, Artificial Sequence
  Description of Artificial Sequence: Synthetic oligonucleotide
cagagggccaagatcagtca

SEQ ID NO: 2072 - DNA, 20 bp, Artificial Sequence
  Description of Artificial Sequence: Synthetic oligonucleotide
cttgctggatgtgatacatg

SEQ ID NO: 2073 - DNA, 20 bp, Artificial Sequence
  Description of Artificial Sequence: Synthetic oligonucleotide
ccacagtggtcacaaaacgt

SEQ ID NO: 2074 - DNA, 20 bp, Artificial Sequence
  Description of Artificial Sequence: Synthetic oligonucleotide
gcagtccataggaccagtgc

SEQ ID NO: 2075 - DNA, 20 bp, Artificial Sequence
  Description of Artificial Sequence: Synthetic oligonucleotide
ccaattcaaaaactcctagc

SEQ ID NO: 2076 - DNA, 20 bp, Artificial Sequence
  Description of Artificial Sequence: Synthetic oligonucleotide
gcgtggtgcattcgaagcgt

SEQ ID NO: 2077 - DNA, 20 bp, Artificial Sequence
  Description of Artificial Sequence: Synthetic oligonucleotide
ctactgacttggtgcgtgga

SEQ ID NO: 2078 - DNA, 20 bp, Artificial Sequence
  Description of Artificial Sequence: Synthetic oligonucleotide
acgccggtcttgatgacgag

SEQ ID NO: 2079 - DNA, 20 bp, Artificial Sequence
  Description of Artificial Sequence: Synthetic oligonucleotide
gagaccgaggtgtatcacca

SEQ ID NO: 2080 - DNA, 20 bp, Artificial Sequence
  Description of Artificial Sequence: Synthetic oligonucleotide
aacatggaagaatccaacaa

SEQ ID NO: 2081 - DNA, 20 bp, Artificial Sequence
  Description of Artificial Sequence: Synthetic oligonucleotide
tcggccggtgctgtacaatg

SEQ ID NO: 2082 - DNA, 20 bp, Artificial Sequence
  Description of Artificial Sequence: Synthetic oligonucleotide
cttagtccaactgatcacgg

SEQ ID NO: 2083 - DNA, 20 bp, Artificial Sequence
  Description of Artificial Sequence: Synthetic oligonucleotide
tgtgtctgttctagcactcg

SEQ ID NO: 2084 - DNA, 20 bp, Artificial Sequence
  Description of Artificial Sequence: Synthetic oligonucleotide
gccggcaaatgcctccacag

SEQ ID NO: 2085 - DNA, 20 bp, Artificial Sequence
  Description of Artificial Sequence: Synthetic oligonucleotide
gatagccatttactgcatag

SEQ ID NO: 2086 - DNA, 20 bp, Artificial Sequence
  Description of Artificial Sequence: Synthetic oligonucleotide
gacccactggttacctacga

SEQ ID NO: 2087 - DNA, 20 bp, Artificial Sequence
  Description of Artificial Sequence: Synthetic oligonucleotide
gccgggaaaagtgattcgag

SEQ ID NO: 2088 - DNA, 20 bp, Artificial Sequence
  Description of Artificial Sequence: Synthetic oligonucleotide
ctacaacgggcacacgaagg

SEQ ID NO: 2089 - DNA, 20 bp, Artificial Sequence
  Description of Artificial Sequence: Synthetic oligonucleotide
gctggttcggctctacgctg

SEQ ID NO: 2090 - DNA, 20 bp, Artificial Sequence
  Description of Artificial Sequence: Synthetic oligonucleotide
gaagaagaatgcctgctgca

SEQ ID NO: 2091 - DNA, 20 bp, Artificial Sequence
  Description of Artificial Sequence: Synthetic oligonucleotide
tggctttggtgactgctgcg

SEQ ID NO: 2092 - DNA, 20 bp, Artificial Sequence
  Description of Artificial Sequence: Synthetic oligonucleotide
actcatacctgccggatcca

SEQ ID NO: 2093 - DNA, 20 bp, Artificial Sequence
  Description of Artificial Sequence: Synthetic oligonucleotide
aactttaactgggatcactg

SEQ ID NO: 2094 - DNA, 20 bp, Artificial Sequence
  Description of Artificial Sequence: Synthetic oligonucleotide
tgccgacattcctcccatcg

SEQ ID NO: 2095 - DNA, 20 bp, Artificial Sequence
  Description of Artificial Sequence: Synthetic oligonucleotide
gtgacatggcacaagatgcg

SEQ ID NO: 2096 - DNA, 20 bp, Artificial Sequence
  Description of Artificial Sequence: Synthetic oligonucleotide
ggagctgcctcggtcaatgg

SEQ ID NO: 2097 - DNA, 20 bp, Artificial Sequence
  Description of Artificial Sequence: Synthetic oligonucleotide
tagctgtggaaggatatcca

SEQ ID NO: 2098 - DNA, 20 bp, Artificial Sequence
  Description of Artificial Sequence: Synthetic oligonucleotide
ggtttgaagagtataaaccc

SEQ ID NO: 2099 - DNA, 20 bp, Artificial Sequence
  Description of Artificial Sequence: Synthetic oligonucleotide
tcttgccatgaaccaaacaa

SEQ ID NO: 2100 - DNA, 20 bp, Artificial Sequence
  Description of Artificial Sequence: Synthetic oligonucleotide
gaagatgatacgcaacggct

SEQ ID NO: 2101 - DNA, 20 bp, Artificial Sequence
  Description of Artificial Sequence: Synthetic oligonucleotide
ttgggctttggaatcatgag

SEQ ID NO: 2102 - DNA, 20 bp, Artificial Sequence
  Description of Artificial Sequence: Synthetic oligonucleotide
catgcaatgaattctacacc

SEQ ID NO: 2103 - DNA, 20 bp, Artificial Sequence
  Description of Artificial Sequence: Synthetic oligonucleotide
aataccaagaaagccccact

SEQ ID NO: 2104 - DNA, 20 bp, Artificial Sequence
  Description of Artificial Sequence: Synthetic oligonucleotide
gggggcgcaaggcacaatgt

SEQ ID NO: 2105 - DNA, 20 bp, Artificial Sequence
  Description of Artificial Sequence: Synthetic oligonucleotide
ttgttcaggcaatctcaaca

SEQ ID NO: 2106 - DNA, 20 bp, Artificial Sequence
  Description of Artificial Sequence: Synthetic oligonucleotide
gtgtgctgagagtgtcaaca

SEQ ID NO: 2107 - DNA, 20 bp, Artificial Sequence
  Description of Artificial Sequence: Synthetic oligonucleotide
agcccaacaacgcttcaccc

SEQ ID NO: 2108 - DNA, 20 bp, Artificial Sequence
  Description of Artificial Sequence: Synthetic oligonucleotide
actttgtaggttataagctg

SEQ ID NO: 2109 - DNA, 20 bp, Artificial Sequence
  Description of Artificial Sequence: Synthetic oligonucleotide
agacaaagaaggctacaagg

SEQ ID NO: 2110 - DNA, 20 bp, Artificial Sequence
  Description of Artificial Sequence: Synthetic oligonucleotide
ccatacgaaccgaatagatg

SEQ ID NO: 2111 - DNA, 20 bp, Artificial Sequence
  Description of Artificial Sequence: Synthetic oligonucleotide
atcgcgtccaacaaccgtaa

SEQ ID NO: 2112 - DNA, 20 bp, Artificial Sequence
  Description of Artificial Sequence: Synthetic oligonucleotide
tatggactgtccgttgtggg

SEQ ID NO: 2113 - DNA, 20 bp, Artificial Sequence
  Description of Artificial Sequence: Synthetic oligonucleotide
caatacctcctacaagaatg

SEQ ID NO: 2114 - DNA, 20 bp, Artificial Sequence
  Description of Artificial Sequence: Synthetic oligonucleotide
aaagcttacctgttctgtag

SEQ ID NO: 2115 - DNA, 20 bp, Artificial Sequence
  Description of Artificial Sequence: Synthetic oligonucleotide
gaagatgagaaaaacaaacg

SEQ ID NO: 2116 - DNA, 20 bp, Artificial Sequence
  Description of Artificial Sequence: Synthetic oligonucleotide
ttctcctcttctgtagtcgg

SEQ ID NO: 2117 - DNA, 20 bp, Artificial Sequence
  Description of Artificial Sequence: Synthetic oligonucleotide
aaacttggcaagcaaacctg

SEQ ID NO: 2118 - DNA, 20 bp, Artificial Sequence
  Description of Artificial Sequence: Synthetic oligonucleotide
tcagataatcgacgccaggg

SEQ ID NO: 2119 - DNA, 20 bp, Artificial Sequence
  Description of Artificial Sequence: Synthetic oligonucleotide
ctgaccgtagacctgcgcgt

SEQ ID NO: 2120 - DNA, 20 bp, Artificial Sequence
  Description of Artificial Sequence: Synthetic oligonucleotide
tactcggaatagagtatcgg

SEQ ID NO: 2121 - DNA, 20 bp, Artificial Sequence
  Description of Artificial Sequence: Synthetic oligonucleotide
tccaggtacacctcgcccag

SEQ ID NO: 2122 - DNA, 20 bp, Artificial Sequence
  Description of Artificial Sequence: Synthetic oligonucleotide
gtccttgaaacgcccatcgt

SEQ ID NO: 2123 - DNA, 20 bp, Artificial Sequence
  Description of Artificial Sequence: Synthetic oligonucleotide
ctttagctggatgtccacgt

SEQ ID NO: 2124 - DNA, 20 bp, Artificial Sequence
  Description of Artificial Sequence: Synthetic oligonucleotide
gggcatgtacaacaccgacg

SEQ ID NO: 2125 - DNA, 20 bp, Artificial Sequence
  Description of Artificial Sequence: Synthetic oligonucleotide
acttcgacaagaataagatc

SEQ ID NO: 2126 - DNA, 20 bp, Artificial Sequence
  Description of Artificial Sequence: Synthetic oligonucleotide
atcccagaactagacgtgca

SEQ ID NO: 2127 - DNA, 20 bp, Artificial Sequence
  Description of Artificial Sequence: Synthetic oligonucleotide
accagaccgtctgatagctg

SEQ ID NO: 2128 - DNA, 20 bp, Artificial Sequence
  Description of Artificial Sequence: Synthetic oligonucleotide
gatacttactcataagtcag

SEQ ID NO: 2129 - DNA, 20 bp, Artificial Sequence
  Description of Artificial Sequence: Synthetic oligonucleotide
agaacgggacactttgctaa

SEQ ID NO: 2130 - DNA, 20 bp, Artificial Sequence
  Description of Artificial Sequence: Synthetic oligonucleotide
cacgctgtgtgatcgcaacg

SEQ ID NO: 2131 - DNA, 20 bp, Artificial Sequence
  Description of Artificial Sequence: Synthetic oligonucleotide
gacaccgatgtctcaatggg

SEQ ID NO: 2132 - DNA, 20 bp, Artificial Sequence
  Description of Artificial Sequence: Synthetic oligonucleotide
ggttggtgcagataccatga

SEQ ID NO: 2133 - DNA, 20 bp, Artificial Sequence
  Description of Artificial Sequence: Synthetic oligonucleotide
gacaggacagtctgacagcg

SEQ ID NO: 2134 - DNA, 20 bp, Artificial Sequence
  Description of Artificial Sequence: Synthetic oligonucleotide
tctcgtctggagaatccacg

SEQ ID NO: 2135 - DNA, 20 bp, Artificial Sequence
  Description of Artificial Sequence: Synthetic oligonucleotide
gaccccatggactacaagtg

SEQ ID NO: 2136 - DNA, 20 bp, Artificial Sequence
  Description of Artificial Sequence: Synthetic oligonucleotide
ggggggtagagtctgatcag

SEQ ID NO: 2137 - DNA, 20 bp, Artificial Sequence
  Description of Artificial Sequence: Synthetic oligonucleotide
ctcttgagtacttgcactcg

SEQ ID NO: 2138 - DNA, 20 bp, Artificial Sequence
  Description of Artificial Sequence: Synthetic oligonucleotide
cttcgaatgacagtaagaca

SEQ ID NO: 2139 - DNA, 20 bp, Artificial Sequence
  Description of Artificial Sequence: Synthetic oligonucleotide
ccatatagaaaataatcctg

SEQ ID NO: 2140 - DNA, 20 bp, Artificial Sequence
  Description of Artificial Sequence: Synthetic oligonucleotide
cctgaaaactcaccgaaggt

SEQ ID NO: 2141 - DNA, 20 bp, Artificial Sequence
  Description of Artificial Sequence: Synthetic oligonucleotide
tgcttgcaaaggaatgcgct

SEQ ID NO: 2142 - DNA, 20 bp, Artificial Sequence
  Description of Artificial Sequence: Synthetic oligonucleotide
aacgcatcaccattcttcga

SEQ ID NO: 2143 - DNA, 20 bp, Artificial Sequence
  Description of Artificial Sequence: Synthetic oligonucleotide
aaaagaatccaacgtgcaag

SEQ ID NO: 2144 - DNA, 20 bp, Artificial Sequence
  Description of Artificial Sequence: Synthetic oligonucleotide
aataaaagtcatacctcatg

SEQ ID NO: 2145 - DNA, 20 bp, Artificial Sequence
  Description of Artificial Sequence: Synthetic oligonucleotide
ctcgccatctatagatacac

SEQ ID NO: 2146 - DNA, 20 bp, Artificial Sequence
  Description of Artificial Sequence: Synthetic oligonucleotide
gatttctgatgaaaaagacg

SEQ ID NO: 2147 - DNA, 20 bp, Artificial Sequence
  Description of Artificial Sequence: Synthetic oligonucleotide
gctctactggagcgacgagg

SEQ ID NO: 2148 - DNA, 20 bp, Artificial Sequence
  Description of Artificial Sequence: Synthetic oligonucleotide
gaggcaaaaagaaatcccca

SEQ ID NO: 2149 - DNA, 20 bp, Artificial Sequence
  Description of Artificial Sequence: Synthetic oligonucleotide
tcacccaaaaaaatgcacca

SEQ ID NO: 2150 - DNA, 20 bp, Artificial Sequence
  Description of Artificial Sequence: Synthetic oligonucleotide
ccctttcgagttcaaccccg

SEQ ID NO: 2151 - DNA, 20 bp, Artificial Sequence
  Description of Artificial Sequence: Synthetic oligonucleotide
gcgcagacacccgtgccgca

SEQ ID NO: 2152 - DNA, 20 bp, Artificial Sequence
  Description of Artificial Sequence: Synthetic oligonucleotide
agggcacaagaacagtgcag

SEQ ID NO: 2153 - DNA, 20 bp, Artificial Sequence
  Description of Artificial Sequence: Synthetic oligonucleotide
ctggagctccgtgatctgag

SEQ ID NO: 2154 - DNA, 20 bp, Artificial Sequence
  Description of Artificial Sequence: Synthetic oligonucleotide
tgaaagtgatagcgatactg

SEQ ID NO: 2155 - DNA, 20 bp, Artificial Sequence
  Description of Artificial Sequence: Synthetic oligonucleotide
tgagtggagaagcacacacg

SEQ ID NO: 2156 - DNA, 20 bp, Artificial Sequence
  Description of Artificial Sequence: Synthetic oligonucleotide
cgtcattgaagaacagtcag

SEQ ID NO: 2157 - DNA, 20 bp, Artificial Sequence
  Description of Artificial Sequence: Synthetic oligonucleotide
atatccatggcttccaacgg

SEQ ID NO: 2158 - DNA, 20 bp, Artificial Sequence
  Description of Artificial Sequence: Synthetic oligonucleotide
tagtggatttatggtctgtg

SEQ ID NO: 2159 - DNA, 20 bp, Artificial Sequence
  Description of Artificial Sequence: Synthetic oligonucleotide
agaatcagactcatgccaag

SEQ ID NO: 2160 - DNA, 20 bp, Artificial Sequence
  Description of Artificial Sequence: Synthetic oligonucleotide
tgatattagatattgatcag

SEQ ID NO: 2161 - DNA, 20 bp, Artificial Sequence
  Description of Artificial Sequence: Synthetic oligonucleotide
agaaactgcaaccaacagta

SEQ ID NO: 2162 - DNA, 20 bp, Artificial Sequence
  Description of Artificial Sequence: Synthetic oligonucleotide
caagaactaccgataccgtg

SEQ ID NO: 2163 - DNA, 20 bp, Artificial Sequence
  Description of Artificial Sequence: Synthetic oligonucleotide
gattcttgatctcacagtca

SEQ ID NO: 2164 - DNA, 20 bp, Artificial Sequence
  Description of Artificial Sequence: Synthetic oligonucleotide
ccacattcgtggctgactgg

SEQ ID NO: 2165 - DNA, 20 bp, Artificial Sequence
  Description of Artificial Sequence: Synthetic oligonucleotide
caagtgtgagaatgaccggg

SEQ ID NO: 2166 - DNA, 20 bp, Artificial Sequence
  Description of Artificial Sequence: Synthetic oligonucleotide
atcagtcagatatggaactg

SEQ ID NO: 2167 - DNA, 20 bp, Artificial Sequence
  Description of Artificial Sequence: Synthetic oligonucleotide
cttcggtcatttgaacactt

SEQ ID NO: 2168 - DNA, 20 bp, Artificial Sequence
  Description of Artificial Sequence: Synthetic oligonucleotide
ccaggggatcaggagaacat

SEQ ID NO: 2169 - DNA, 20 bp, Artificial Sequence
  Description of Artificial Sequence: Synthetic oligonucleotide
tgacacatggtcattagact

SEQ ID NO: 2170 - DNA, 20 bp, Artificial Sequence
  Description of Artificial Sequence: Synthetic oligonucleotide
tacttcaaggaatatcacgt

SEQ ID NO: 2171 - DNA, 20 bp, Artificial Sequence
  Description of Artificial Sequence: Synthetic oligonucleotide
cacactctgaagcaacatcc

SEQ ID NO: 2172 - DNA, 20 bp, Artificial Sequence
  Description of Artificial Sequence: Synthetic oligonucleotide
tagttgacttctcagccacg

SEQ ID NO: 2173 - DNA, 20 bp, Artificial Sequence
  Description of Artificial Sequence: Synthetic oligonucleotide
ggtgaagcagatcgagagca

SEQ ID NO: 2174 - DNA, 20 bp, Artificial Sequence
  Description of Artificial Sequence: Synthetic oligonucleotide
atgtagatccaattccacgt

SEQ ID NO: 2175 - DNA, 20 bp, Artificial Sequence
  Description of Artificial Sequence: Synthetic oligonucleotide
cccatccactcacaagccgg

SEQ ID NO: 2176 - DNA, 20 bp, Artificial Sequence
  Description of Artificial Sequence: Synthetic oligonucleotide
caagctatgaaatcagaggg

SEQ ID NO: 2177 - DNA, 20 bp, Artificial Sequence
  Description of Artificial Sequence: Synthetic oligonucleotide
taccttcaaagttatgtacc

SEQ ID NO: 2178 - DNA, 20 bp, Artificial Sequence
  Description of Artificial Sequence: Synthetic oligonucleotide
cctcccataactctgaccga

SEQ ID NO: 2179 - DNA, 20 bp, Artificial Sequence
  Description of Artificial Sequence: Synthetic oligonucleotide
gcccgagacagtgtaccggg

SEQ ID NO: 2180 - DNA, 20 bp, Artificial Sequence
  Description of Artificial Sequence: Synthetic oligonucleotide
tcagcctcacaatattgcag

SEQ ID NO: 2181 - DNA, 20 bp, Artificial Sequence
  Description of Artificial Sequence: Synthetic oligonucleotide
aggagacattgggctcccct

SEQ ID NO: 2182 - DNA, 20 bp, Artificial Sequence
  Description of Artificial Sequence: Synthetic oligonucleotide
gtagatgcgctcgtgcagcg

SEQ ID NO: 2183 - DNA, 20 bp, Artificial Sequence
  Description of Artificial Sequence: Synthetic oligonucleotide
ccagacccattaccccggtg

SEQ ID NO: 2184 - DNA, 20 bp, Artificial Sequence
  Description of Artificial Sequence: Synthetic oligonucleotide
tatcagctataaatatcgag

SEQ ID NO: 2185 - DNA, 20 bp, Artificial Sequence
  Description of Artificial Sequence: Synthetic oligonucleotide
tcccagggttccatatacct

SEQ ID NO: 2186 - DNA, 20 bp, Artificial Sequence
  Description of Artificial Sequence: Synthetic oligonucleotide
ctaggtccgaaacattccac

SEQ ID NO: 2187 - DNA, 20 bp, Artificial Sequence
  Description of Artificial Sequence: Synthetic oligonucleotide
ggaaagtattattgtcaccg

SEQ ID NO: 2188 - DNA, 20 bp, Artificial Sequence
  Description of Artificial Sequence: Synthetic oligonucleotide
atgaaaagccagatggccag

SEQ ID NO: 2189 - DNA, 20 bp, Artificial Sequence
  Description of Artificial Sequence: Synthetic oligonucleotide
aagatgaagaatgcccacaa

SEQ ID NO: 2190 - DNA, 20 bp, Artificial Sequence
  Description of Artificial Sequence: Synthetic oligonucleotide
ccagttatcacatctgtatg

SEQ ID NO: 2191 - DNA, 20 bp, Artificial Sequence
  Description of Artificial Sequence: Synthetic oligonucleotide
tcagcctgttcgaccaagtg

SEQ ID NO: 2192 - DNA, 20 bp, Artificial Sequence
  Description of Artificial Sequence: Synthetic oligonucleotide
ccccagtgcgcccttcaccg

SEQ ID NO: 2193 - DNA, 20 bp, Artificial Sequence
  Description of Artificial Sequence: Synthetic oligonucleotide
agcagggctatagaatgtca

SEQ ID NO: 2194 - DNA, 20 bp, Artificial Sequence
  Description of Artificial Sequence: Synthetic oligonucleotide
aaagctgttcatgtgaacca

SEQ ID NO: 2195 - DNA, 20 bp, Artificial Sequence
  Description of Artificial Sequence: Synthetic oligonucleotide
ggtgctttgcgattcacagg

SEQ ID NO: 2196 - DNA, 20 bp, Artificial Sequence
  Description of Artificial Sequence: Synthetic oligonucleotide
gtaaccaaagctgattgact

SEQ ID NO: 2197 - DNA, 20 bp, Artificial Sequence
  Description of Artificial Sequence: Synthetic oligonucleotide
ggggtctcaacgcacacccg

SEQ ID NO: 2198 - DNA, 20 bp, Artificial Sequence
  Description of Artificial Sequence: Synthetic oligonucleotide
aagcaccagatcatgcaccg

SEQ ID NO: 2199 - DNA, 20 bp, Artificial Sequence
  Description of Artificial Sequence: Synthetic oligonucleotide
acggcgagttgcattcgtgc

SEQ ID NO: 2200 - DNA, 20 bp, Artificial Sequence
  Description of Artificial Sequence: Synthetic oligonucleotide
ggcccatcccctaccagcga

SEQ ID NO: 2201 - DNA, 20 bp, Artificial Sequence
  Description of Artificial Sequence: Synthetic oligonucleotide
ggattcccgaggagatcctg

SEQ ID NO: 2202 - DNA, 20 bp, Artificial Sequence
  Description of Artificial Sequence: Synthetic oligonucleotide
cgtgtccgagtaccccagcg

SEQ ID NO: 2203 - DNA, 20 bp, Artificial Sequence
  Description of Artificial Sequence: Synthetic oligonucleotide
ccagcgcccggcagtagctg

SEQ ID NO: 2204 - DNA, 20 bp, Artificial Sequence
  Description of Artificial Sequence: Synthetic oligonucleotide
tgggaacggctcgtcagagg

SEQ ID NO: 2205 - DNA, 20 bp, Artificial Sequence
  Description of Artificial Sequence: Synthetic oligonucleotide
gctcctaaagatccgttctg

SEQ ID NO: 2206 - DNA, 20 bp, Artificial Sequence
  Description of Artificial Sequence: Synthetic oligonucleotide
gcggcggccgacatcgcagt

SEQ ID NO: 2207 - DNA, 20 bp, Artificial Sequence
  Description of Artificial Sequence: Synthetic oligonucleotide
tggcttggtgaccggcacga

SEQ ID NO: 2208 - DNA, 20 bp, Artificial Sequence
  Description of Artificial Sequence: Synthetic oligonucleotide
atgctaggttggaacaactg

SEQ ID NO: 2209 - DNA, 20 bp, Artificial Sequence
  Description of Artificial Sequence: Synthetic oligonucleotide
aagcagttgatgatgtgtag

SEQ ID NO: 2210 - DNA, 20 bp, Artificial Sequence
  Description of Artificial Sequence: Synthetic oligonucleotide
cagaacagcatgacaaacag

SEQ ID NO: 2211 - DNA, 20 bp, Artificial Sequence
  Description of Artificial Sequence: Synthetic oligonucleotide
gaaatgacacagcaaaatgg

SEQ ID NO: 2212 - DNA, 20 bp, Artificial Sequence
  Description of Artificial Sequence: Synthetic oligonucleotide
caggctcagcaggaacacta

SEQ ID NO: 2213 - DNA, 20 bp, Artificial Sequence
  Description of Artificial Sequence: Synthetic oligonucleotide
actgacccagaagcgtcact

SEQ ID NO: 2214 - DNA, 20 bp, Artificial Sequence
  Description of Artificial Sequence: Synthetic oligonucleotide
ctgcaccatagaaacgtgtg

SEQ ID NO: 2215 - DNA, 20 bp, Artificial Sequence
  Description of Artificial Sequence: Synthetic oligonucleotide
atttcatgtagatactccag

SEQ ID NO: 2216 - DNA, 20 bp, Artificial Sequence
  Description of Artificial Sequence: Synthetic oligonucleotide
acaaattgataatataggag

SEQ ID NO: 2217 - DNA, 20 bp, Artificial Sequence
  Description of Artificial Sequence: Synthetic oligonucleotide
tatttgaaactactaggtaa

SEQ ID NO: 2218 - DNA, 20 bp, Artificial Sequence
  Description of Artificial Sequence: Synthetic oligonucleotide
ggattccaaacaacacacag

SEQ ID NO: 2219 - DNA, 20 bp, Artificial Sequence
  Description of Artificial Sequence: Synthetic oligonucleotide
ctgctgtgtagagtatagag

SEQ ID NO: 2220 - DNA, 20 bp, Artificial Sequence
  Description of Artificial Sequence: Synthetic oligonucleotide
ctacttgtgtgatgtgacat

SEQ ID NO: 2221 - DNA, 20 bp, Artificial Sequence
  Description of Artificial Sequence: Synthetic oligonucleotide
gaatataaaggaatgccagg

SEQ ID NO: 2222 - DNA, 20 bp, Artificial Sequence
  Description of Artificial Sequence: Synthetic oligonucleotide
cggcacagctcgtcgcacag

SEQ ID NO: 2223 - DNA, 20 bp, Artificial Sequence
  Description of Artificial Sequence: Synthetic oligonucleotide
ctagatcgggaaagtctgtg

SEQ ID NO: 2224 - DNA, 20 bp, Artificial Sequence
  Description of Artificial Sequence: Synthetic oligonucleotide
tgccgaacttcactacatgg

SEQ ID NO: 2225 - DNA, 20 bp, Artificial Sequence
  Description of Artificial Sequence: Synthetic oligonucleotide
cccggtgaccgtgtacgacg

SEQ ID NO: 2226 - DNA, 20 bp, Artificial Sequence
  Description of Artificial Sequence: Synthetic oligonucleotide
gggcccataatcgagcccag

SEQ ID NO: 2227 - DNA, 20 bp, Artificial Sequence
  Description of Artificial Sequence: Synthetic oligonucleotide
aggtaaagctggctttcgag

SEQ ID NO: 2228 - DNA, 20 bp, Artificial Sequence
  Description of Artificial Sequence: Synthetic oligonucleotide
gcatacatagaagatcacag

SEQ ID NO: 2229 - DNA, 20 bp, Artificial Sequence
  Description of Artificial Sequence: Synthetic oligonucleotide
agagctgtttgacaaagtgg

SEQ ID NO: 2230 - DNA, 20 bp, Artificial Sequence
  Description of Artificial Sequence: Synthetic oligonucleotide
tcaaagaagcagtatcggca

SEQ ID NO: 2231 - DNA, 20 bp, Artificial Sequence
  Description of Artificial Sequence: Synthetic oligonucleotide
tagctaaatatttagcacag

SEQ ID NO: 2232 - DNA, 20 bp, Artificial Sequence
  Description of Artificial Sequence: Synthetic oligonucleotide
cacagcactaaatacaactc

SEQ ID NO: 2233 - DNA, 20 bp, Artificial Sequence
  Description of Artificial Sequence: Synthetic oligonucleotide
atcattataaaagaacatcc

SEQ ID NO: 2234 - DNA, 20 bp, Artificial Sequence
  Description of Artificial Sequence: Synthetic oligonucleotide
gatctgtcaagctttcatac

SEQ ID NO: 2235 - DNA, 20 bp, Artificial Sequence
  Description of Artificial Sequence: Synthetic oligonucleotide
tctcacgggatatgtttaga

SEQ ID NO: 2236 - DNA, 20 bp, Artificial Sequence
  Description of Artificial Sequence: Synthetic oligonucleotide
cagtgaggacagacacaggt

SEQ ID NO: 2237 - DNA, 20 bp, Artificial Sequence
  Description of Artificial Sequence: Synthetic oligonucleotide
gatcaaaaggagcacgtcgt

SEQ ID NO: 2238 - DNA, 20 bp, Artificial Sequence
  Description of Artificial Sequence: Synthetic oligonucleotide
tgaatgacgtggcatcactg

SEQ ID NO: 2239 - DNA, 20 bp, Artificial Sequence
  Description of Artificial Sequence: Synthetic oligonucleotide
caggcggccctcatacacgt

SEQ ID NO: 2240 - DNA, 20 bp, Artificial Sequence
  Description of Artificial Sequence: Synthetic oligonucleotide
aatacctagccacactcgag

SEQ ID NO: 2241 - DNA, 20 bp, Artificial Sequence
  Description of Artificial Sequence: Synthetic oligonucleotide
ttgggcctgagcatcgaaga

SEQ ID NO: 2242 - DNA, 20 bp, Artificial Sequence
  Description of Artificial Sequence: Synthetic oligonucleotide
aacctctgtaatgacgacgg

SEQ ID NO: 2243 - DNA, 20 bp, Artificial Sequence
  Description of Artificial Sequence: Synthetic oligonucleotide
tgtacaccatcactccacag

SEQ ID NO: 2244 - DNA, 20 bp, Artificial Sequence
  Description of Artificial Sequence: Synthetic oligonucleotide
tatcgaatggaacagcctga

SEQ ID NO: 2245 - DNA, 20 bp, Artificial Sequence
  Description of Artificial Sequence: Synthetic oligonucleotide
ggttcaacatcacaaccata

SEQ ID NO: 2246 - DNA, 20 bp, Artificial Sequence
  Description of Artificial Sequence: Synthetic oligonucleotide
tgagccgtataaaagcccgt

SEQ ID NO: 2247 - DNA, 20 bp, Artificial Sequence
  Description of Artificial Sequence: Synthetic oligonucleotide
ctcctctactgtagcaacgg

SEQ ID NO: 2248 - DNA, 20 bp, Artificial Sequence
  Description of Artificial Sequence: Synthetic oligonucleotide
ttcctgaggatccttccgga

SEQ ID NO: 2249 - DNA, 20 bp, Artificial Sequence
  Description of Artificial Sequence: Synthetic oligonucleotide
agaagtttaatctgcctcca

SEQ ID NO: 2250 - DNA, 20 bp, Artificial Sequence
  Description of Artificial Sequence: Synthetic oligonucleotide
atgaggcgatacttggaacg

SEQ ID NO: 2251 - DNA, 20 bp, Artificial Sequence
  Description of Artificial Sequence: Synthetic oligonucleotide
tgtcgaaattatagccgagg

SEQ ID NO: 2252 - DNA, 20 bp, Artificial Sequence
  Description of Artificial Sequence: Synthetic oligonucleotide
atcatgtgagacaacaccgg

SEQ ID NO: 2253 - DNA, 20 bp, Artificial Sequence
  Description of Artificial Sequence: Synthetic oligonucleotide
accattgcccaacctccgcg

SEQ ID NO: 2254 - DNA, 20 bp, Artificial Sequence
  Description of Artificial Sequence: Synthetic oligonucleotide
tgaatggaatgcaccagtgg

SEQ ID NO: 2255 - DNA, 20 bp, Artificial Sequence
  Description of Artificial Sequence: Synthetic oligonucleotide
acgtcactgataaaaccggt

SEQ ID NO: 2256 - DNA, 20 bp, Artificial Sequence
  Description of Artificial Sequence: Synthetic oligonucleotide
aacctgcagatacccaattg

SEQ ID NO: 2257 - DNA, 20 bp, Artificial Sequence
  Description of Artificial Sequence: Synthetic oligonucleotide
ttggtgatgccaaagtactg

SEQ ID NO: 2258 - DNA, 20 bp, Artificial Sequence
  Description of Artificial Sequence: Synthetic oligonucleotide
tcatcaatgccatcccgcag

SEQ ID NO: 2259 - DNA, 20 bp, Artificial Sequence
  Description of Artificial Sequence: Synthetic oligonucleotide
acctggagcacaatgcacgt

SEQ ID NO: 2260 - DNA, 20 bp, Artificial Sequence
  Description of Artificial Sequence: Synthetic oligonucleotide
tgggtcaatgccaggcgatg

SEQ ID NO: 2261 - DNA, 20 bp, Artificial Sequence
  Description of Artificial Sequence: Synthetic oligonucleotide
gtcagccccaccaatatgca

SEQ ID NO: 2262 - DNA, 20 bp, Artificial Sequence
  Description of Artificial Sequence: Synthetic oligonucleotide
cccgtagccgatcataacgg

SEQ ID NO: 2263 - DNA, 20 bp, Artificial Sequence
  Description of Artificial Sequence: Synthetic oligonucleotide
ggatcaaggagcaagtagtg

SEQ ID NO: 2264 - DNA, 20 bp, Artificial Sequence
  Description of Artificial Sequence: Synthetic oligonucleotide
tggagttactctcactggag

SEQ ID NO: 2265 - DNA, 20 bp, Artificial Sequence
  Description of Artificial Sequence: Synthetic oligonucleotide
gcgcgttagtggcccctacg

SEQ ID NO: 2266 - DNA, 20 bp, Artificial Sequence
  Description of Artificial Sequence: Synthetic oligonucleotide
tggcggcaagaattcgacca

SEQ ID NO: 2267 - DNA, 20 bp, Artificial Sequence
  Description of Artificial Sequence: Synthetic oligonucleotide
ttggcacgcctaaaactcgt

SEQ ID NO: 2268 - DNA, 20 bp, Artificial Sequence
  Description of Artificial Sequence: Synthetic oligonucleotide
ggacctatgaggctttatgt

SEQ ID NO: 2269 - DNA, 20 bp, Artificial Sequence
  Description of Artificial Sequence: Synthetic oligonucleotide
aaatttaacagtgccatccg

SEQ ID NO: 2270 - DNA, 20 bp, Artificial Sequence
  Description of Artificial Sequence: Synthetic oligonucleotide
catccgtccagataacatgt

SEQ ID NO: 2271 - DNA, 20 bp, Artificial Sequence
  Description of Artificial Sequence: Synthetic oligonucleotide
tgagtcatgcggattcggtg

SEQ ID NO: 2272 - DNA, 20 bp, Artificial Sequence
  Description of Artificial Sequence: Synthetic oligonucleotide
gcaccgggcaacgttacgaa

SEQ ID NO: 2273 - DNA, 20 bp, Artificial Sequence
  Description of Artificial Sequence: Synthetic oligonucleotide
ggagatgttccagcctagtg

SEQ ID NO: 2274 - DNA, 20 bp, Artificial Sequence
  Description of Artificial Sequence: Synthetic oligonucleotide
tggaaactattcatgctacc

SEQ ID NO: 2275 - DNA, 20 bp, Artificial Sequence
  Description of Artificial Sequence: Synthetic oligonucleotide
actcacaaacaacattgctg

SEQ ID NO: 2276 - DNA, 20 bp, Artificial Sequence
  Description of Artificial Sequence: Synthetic oligonucleotide
ccgtggccagaaacccccgc

SEQ ID NO: 2277 - DNA, 20 bp, Artificial Sequence
  Description of Artificial Sequence: Synthetic oligonucleotide
cctgagcacccagtgaacag

SEQ ID NO: 2278 - DNA, 20 bp, Artificial Sequence
  Description of Artificial Sequence: Synthetic oligonucleotide
tcggaaaaagacctctcggg

SEQ ID NO: 2279 - DNA, 20 bp, Artificial Sequence
  Description of Artificial Sequence: Synthetic oligonucleotide
gtttcatccaggatcgagca

SEQ ID NO: 2280 - DNA, 20 bp, Artificial Sequence
  Description of Artificial Sequence: Synthetic oligonucleotide
agtagaaaagggcgacaacc

SEQ ID NO: 2281 - DNA, 20 bp, Artificial Sequence
  Description of Artificial Sequence: Synthetic oligonucleotide
ggacgaactggacagtaaca

SEQ ID NO: 2282 - DNA, 20 bp, Artificial Sequence
  Description of Artificial Sequence: Synthetic oligonucleotide
cgaccatgaatatactacca

SEQ ID NO: 2283 - DNA, 20 bp, Artificial Sequence
  Description of Artificial Sequence: Synthetic oligonucleotide
tggaagaggctcatatggtg

SEQ ID NO: 2284 - DNA, 20 bp, Artificial Sequence
  Description of Artificial Sequence: Synthetic oligonucleotide
actcactcatcctcatctcg

SEQ ID NO: 2285 - DNA, 20 bp, Artificial Sequence
  Description of Artificial Sequence: Synthetic oligonucleotide
caaacataaagacagagaca

SEQ ID NO: 2286 - DNA, 20 bp, Artificial Sequence
  Description of Artificial Sequence: Synthetic oligonucleotide
tgtcaccacataattacctg

SEQ ID NO: 2287 - DNA, 20 bp, Artificial Sequence
  Description of Artificial Sequence: Synthetic oligonucleotide
gtggagcctcttacacccag

SEQ ID NO: 2288 - DNA, 20 bp, Artificial Sequence
  Description of Artificial Sequence: Synthetic oligonucleotide
gtctgcgtacttccagacca

SEQ ID NO: 2289 - DNA, 20 bp, Artificial Sequence
  Description of Artificial Sequence: Synthetic oligonucleotide
tcttgccggaatgtcagccg

SEQ ID NO: 2290 - DNA, 20 bp, Artificial Sequence
  Description of Artificial Sequence: Synthetic oligonucleotide
ctaggaacgtgagttaagca

SEQ ID NO: 2291 - DNA, 20 bp, Artificial Sequence
  Description of Artificial Sequence: Synthetic oligonucleotide
aagcggcgtgatgaaatgct

SEQ ID NO: 2292 - DNA, 20 bp, Artificial Sequence
  Description of Artificial Sequence: Synthetic oligonucleotide
aaacagcacaagttagacac

SEQ ID NO: 2293 - DNA, 20 bp, Artificial Sequence
  Description of Artificial Sequence: Synthetic oligonucleotide
aaaaactgccaaccaactga

SEQ ID NO: 2294 - DNA, 20 bp, Artificial Sequence
  Description of Artificial Sequence: Synthetic oligonucleotide
caggtcccgatcattcatag

SEQ ID NO: 2295 - DNA, 20 bp, Artificial Sequence
  Description of Artificial Sequence: Synthetic oligonucleotide
gctggtccgactctacgcag

SEQ ID NO: 2296 - DNA, 20 bp, Artificial Sequence
  Description of Artificial Sequence: Synthetic oligonucleotide
gcttcttgctccaatcaaca

SEQ ID NO: 2297 - DNA, 20 bp, Artificial Sequence
  Description of Artificial Sequence: Synthetic oligonucleotide
actcgggccacaaagttact

SEQ ID NO: 2298 - DNA, 20 bp, Artificial Sequence
  Description of Artificial Sequence: Synthetic oligonucleotide
ataccttgacataaatcaca

SEQ ID NO: 2299 - DNA, 20 bp, Artificial Sequence
  Description of Artificial Sequence: Synthetic oligonucleotide
cagtatcaggatccaacaag

SEQ ID NO: 2300 - DNA, 20 bp, Artificial Sequence
  Description of Artificial Sequence: Synthetic oligonucleotide
gtggctccaaagatcaactc

SEQ ID NO: 2301 - DNA, 20 bp, Artificial Sequence
  Description of Artificial Sequence: Synthetic oligonucleotide
aggtcctgggaactccaaca

SEQ ID NO: 2302 - DNA, 20 bp, Artificial Sequence
  Description of Artificial Sequence: Synthetic oligonucleotide
gcagttgcagtacatcggcg

SEQ ID NO: 2303 - DNA, 20 bp, Artificial Sequence
  Description of Artificial Sequence: Synthetic oligonucleotide
agtaggtctgatgttcgaag

SEQ ID NO: 2304 - DNA, 20 bp, Artificial Sequence
  Description of Artificial Sequence: Synthetic oligonucleotide
ttccgccatgagaatgtcat

SEQ ID NO: 2305 - DNA, 20 bp, Artificial Sequence
  Description of Artificial Sequence: Synthetic oligonucleotide
tggagggctttagatctcgg

SEQ ID NO: 2306 - DNA, 20 bp, Artificial Sequence
  Description of Artificial Sequence: Synthetic oligonucleotide
gaagccgggaacctactact

SEQ ID NO: 2307 - DNA, 20 bp, Artificial Sequence
  Description of Artificial Sequence: Synthetic oligonucleotide
caagatgtgcctcaactacg

SEQ ID NO: 2308 - DNA, 20 bp, Artificial Sequence
  Description of Artificial Sequence: Synthetic oligonucleotide
ccgttaatgactttgccacg

SEQ ID NO: 2309 - DNA, 20 bp, Artificial Sequence
  Description of Artificial Sequence: Synthetic oligonucleotide
gaggtgagcattgaacacct

SEQ ID NO: 2310 - DNA, 20 bp, Artificial Sequence
  Description of Artificial Sequence: Synthetic oligonucleotide
ttcccgaactttgaagtcgg

SEQ ID NO: 2311 - DNA, 20 bp, Artificial Sequence
  Description of Artificial Sequence: Synthetic oligonucleotide
agaatgcactcaccttgtca

SEQ ID NO: 2312 - DNA, 20 bp, Artificial Sequence
  Description of Artificial Sequence: Synthetic oligonucleotide
ccaggaccaagcctttcaca

SEQ ID NO: 2313 - DNA, 20 bp, Artificial Sequence
  Description of Artificial Sequence: Synthetic oligonucleotide
agcagcctccacaaattgaa

SEQ ID NO: 2314 - DNA, 20 bp, Artificial Sequence
  Description of Artificial Sequence: Synthetic oligonucleotide
ccgtgacaaaccgagcactg

SEQ ID NO: 2315 - DNA, 20 bp, Artificial Sequence
  Description of Artificial Sequence: Synthetic oligonucleotide
gggctaggccaattgaccga

SEQ ID NO: 2316 - DNA, 20 bp, Artificial Sequence
  Description of Artificial Sequence: Synthetic oligonucleotide
gtaattgatcttgtacatgg

SEQ ID NO: 2317 - DNA, 20 bp, Artificial Sequence
  Description of Artificial Sequence: Synthetic oligonucleotide
aagttgatgacagcaacact

SEQ ID NO: 2318 - DNA, 20 bp, Artificial Sequence
  Description of Artificial Sequence: Synthetic oligonucleotide
ttgatgtccatctcacaacg

SEQ ID NO: 2319 - DNA, 20 bp, Artificial Sequence
  Description of Artificial Sequence: Synthetic oligonucleotide
ctggggacacacatcgacga

SEQ ID NO: 2320 - DNA, 20 bp, Artificial Sequence
  Description of Artificial Sequence: Synthetic oligonucleotide
ttgttgatataatcccagca

SEQ ID NO: 2321 - DNA, 20 bp, Artificial Sequence
  Description of Artificial Sequence: Synthetic oligonucleotide
cattggtggatacagatgcg

SEQ ID NO: 2322 - DNA, 20 bp, Artificial Sequence
  Description of Artificial Sequence: Synthetic oligonucleotide
acagctctagggtcacagaa

SEQ ID NO: 2323 - DNA, 20 bp, Artificial Sequence
  Description of Artificial Sequence: Synthetic oligonucleotide
ccacacaccccacagatccg

SEQ ID NO: 2324 - DNA, 20 bp, Artificial Sequence
  Description of Artificial Sequence: Synthetic oligonucleotide
ctgccggctcaaacgctgtg

SEQ ID NO: 2325 - DNA, 20 bp, Artificial Sequence
  Description of Artificial Sequence: Synthetic oligonucleotide
ccatcattcacacgaactgg

SEQ ID NO: 2326 - DNA, 20 bp, Artificial Sequence
  Description of Artificial Sequence: Synthetic oligonucleotide
ggttagaaattcgagccaag

SEQ ID NO: 2327 - DNA, 20 bp, Artificial Sequence
  Description of Artificial Sequence: Synthetic oligonucleotide
gggaagacttccctgactgg

SEQ ID NO: 2328 - DNA, 20 bp, Artificial Sequence
  Description of Artificial Sequence: Synthetic oligonucleotide
tgttggcctttgttgacaca

SEQ ID NO: 2329 - DNA, 20 bp, Artificial Sequence
  Description of Artificial Sequence: Synthetic oligonucleotide
ggggttaccccttatctctg

SEQ ID NO: 2330 - DNA, 20 bp, Artificial Sequence
  Description of Artificial Sequence: Synthetic oligonucleotide
tcagtgatgatatagaacgg

SEQ ID NO: 2331 - DNA, 20 bp, Artificial Sequence
  Description of Artificial Sequence: Synthetic oligonucleotide
ggttcatcatcattcaacgg

SEQ ID NO: 2332 - DNA, 20 bp, Artificial Sequence
  Description of Artificial Sequence: Synthetic oligonucleotide
ttgctccctcgaaaagagcg

SEQ ID NO: 2333 - DNA, 20 bp, Artificial Sequence
  Description of Artificial Sequence: Synthetic oligonucleotide
cttaggctataatcacaatg

SEQ ID NO: 2334 - DNA, 20 bp, Artificial Sequence
  Description of Artificial Sequence: Synthetic oligonucleotide
ttgcaatatggatgtcaatg

SEQ ID NO: 2335 - DNA, 20 bp, Artificial Sequence
  Description of Artificial Sequence: Synthetic oligonucleotide
gcagcttgagaattacattg

SEQ ID NO: 2336 - DNA, 20 bp, Artificial Sequence
  Description of Artificial Sequence: Synthetic oligonucleotide
agatataaccggattcaaca

SEQ ID NO: 2337 - DNA, 20 bp, Artificial Sequence
  Description of Artificial Sequence: Synthetic oligonucleotide
gcagagagatgctccacacg

SEQ ID NO: 2338 - DNA, 20 bp, Artificial Sequence
  Description of Artificial Sequence: Synthetic oligonucleotide
agggccacttacccccacgt

SEQ ID NO: 2339 - DNA, 20 bp, Artificial Sequence
  Description of Artificial Sequence: Synthetic oligonucleotide
cttcgccagctagactctgg

SEQ ID NO: 2340 - DNA, 20 bp, Artificial Sequence
  Description of Artificial Sequence: Synthetic oligonucleotide
gaggttgggattgcttaggg

SEQ ID NO: 2341 - DNA, 20 bp, Artificial Sequence
  Description of Artificial Sequence: Synthetic oligonucleotide
ccacctgccatgaacacggg

SEQ ID NO: 2342 - DNA, 20 bp, Artificial Sequence
  Description of Artificial Sequence: Synthetic oligonucleotide
accaatgttcatataaatgg

SEQ ID NO: 2343 - DNA, 20 bp, Artificial Sequence
  Description of Artificial Sequence: Synthetic oligonucleotide
ctgactgtgttcttagctca

SEQ ID NO: 2344 - DNA, 20 bp, Artificial Sequence
  Description of Artificial Sequence: Synthetic oligonucleotide
tgtatgtgatgtcggcagac

SEQ ID NO: 2345 - DNA, 20 bp, Artificial Sequence
  Description of Artificial Sequence: Synthetic oligonucleotide
tgaagaggtaatgtctgtcc

SEQ ID NO: 2346 - DNA, 20 bp, Artificial Sequence
  Description of Artificial Sequence: Synthetic oligonucleotide
cttcgacacatgggataacg

SEQ ID NO: 2347 - DNA, 20 bp, Artificial Sequence
  Description of Artificial Sequence: Synthetic oligonucleotide
ggtggtcggagattcgtagc

SEQ ID NO: 2348 - DNA, 20 bp, Artificial Sequence
  Description of Artificial Sequence: Synthetic oligonucleotide
catggccacaacaactgacg

SEQ ID NO: 2349 - DNA, 20 bp, Artificial Sequence
  Description of Artificial Sequence: Synthetic oligonucleotide
ctgaaagctctccacctcca

SEQ ID NO: 2350 - DNA, 20 bp, Artificial Sequence
  Description of Artificial Sequence: Synthetic oligonucleotide
accccgatcatggtaccaag

SEQ ID NO: 2351 - DNA, 20 bp, Artificial Sequence
  Description of Artificial Sequence: Synthetic oligonucleotide
attctattaggatccatctg

SEQ ID NO: 2352 - DNA, 20 bp, Artificial Sequence
  Description of Artificial Sequence: Synthetic oligonucleotide
catgagccatccaccatcgc

SEQ ID NO: 2353 - DNA, 20 bp, Artificial Sequence
  Description of Artificial Sequence: Synthetic oligonucleotide
ggagggccacgaacatggag

SEQ ID NO: 2354 - DNA, 20 bp, Artificial Sequence
  Description of Artificial Sequence: Synthetic oligonucleotide
cggcggtggttaggtcggtg

SEQ ID NO: 2355 - DNA, 20 bp, Artificial Sequence
  Description of Artificial Sequence: Synthetic oligonucleotide
ggcctgctacctcttcgtgt

SEQ ID NO: 2356 - DNA, 20 bp, Artificial Sequence
  Description of Artificial Sequence: Synthetic oligonucleotide
tagccgatgcccttacacag

SEQ ID NO: 2357 - DNA, 20 bp, Artificial Sequence
  Description of Artificial Sequence: Synthetic oligonucleotide
acacgctcaccataggcgcg

SEQ ID NO: 2358 - DNA, 20 bp, Artificial Sequence
  Description of Artificial Sequence: Synthetic oligonucleotide
agaacgttcgtggttccgtg

SEQ ID NO: 2359 - DNA, 20 bp, Artificial Sequence
  Description of Artificial Sequence: Synthetic oligonucleotide
taaaagggcgatctaatgaa

SEQ ID NO: 2360 - DNA, 20 bp, Artificial Sequence
  Description of Artificial Sequence: Synthetic oligonucleotide
gttgtgtataactttgtctg

SEQ ID NO: 2361 - DNA, 20 bp, Artificial Sequence
  Description of Artificial Sequence: Synthetic oligonucleotide
atgggcaagaccgctcgccg

SEQ ID NO: 2362 - DNA, 20 bp, Artificial Sequence
  Description of Artificial Sequence: Synthetic oligonucleotide
tctcccggaccccgtcaact

SEQ ID NO: 2363 - DNA, 20 bp, Artificial Sequence
  Description of Artificial Sequence: Synthetic oligonucleotide
gccacttcaaggaccccaag

SEQ ID NO: 2364 - DNA, 20 bp, Artificial Sequence
  Description of Artificial Sequence: Synthetic oligonucleotide
gggtgccagattagcggacg

SEQ ID NO: 2365 - DNA, 20 bp, Artificial Sequence
  Description of Artificial Sequence: Synthetic oligonucleotide
ttcacggatgggtgtctccg

SEQ ID NO: 2366 - DNA, 20 bp, Artificial Sequence
  Description of Artificial Sequence: Synthetic oligonucleotide
ttggatgtacgtgtatactg

SEQ ID NO: 2367 - DNA, 20 bp, Artificial Sequence
  Description of Artificial Sequence: Synthetic oligonucleotide
caaagacaacacctacaatg

SEQ ID NO: 2368 - DNA, 20 bp, Artificial Sequence
  Description of Artificial Sequence: Synthetic oligonucleotide
ctccagaacttcatagcggt

SEQ ID NO: 2369 - DNA, 20 bp, Artificial Sequence
  Description of Artificial Sequence: Synthetic oligonucleotide
tgaagccaagaagctcgaca

SEQ ID NO: 2370 - DNA, 20 bp, Artificial Sequence
  Description of Artificial Sequence: Synthetic oligonucleotide
ggatacagggctctacacag

SEQ ID NO: 2371 - DNA, 20 bp, Artificial Sequence
  Description of Artificial Sequence: Synthetic oligonucleotide
tggctttgaatgtggcgtgt

SEQ ID NO: 2372 - DNA, 20 bp, Artificial Sequence
  Description of Artificial Sequence: Synthetic oligonucleotide
ttgtttcgttgtgttccgag

SEQ ID NO: 2373 - DNA, 20 bp, Artificial Sequence
  Description of Artificial Sequence: Synthetic oligonucleotide
ctgcagggaacctccaccat

SEQ ID NO: 2374 - DNA, 20 bp, Artificial Sequence
  Description of Artificial Sequence: Synthetic oligonucleotide
gcccaacaagcaacgcacgg

SEQ ID NO: 2375 - DNA, 20 bp, Artificial Sequence
  Description of Artificial Sequence: Synthetic oligonucleotide
gtagtgatggaaccccccgg

SEQ ID NO: 2376 - DNA, 20 bp, Artificial Sequence
  Description of Artificial Sequence: Synthetic oligonucleotide
tggtctaccgactcatcaag

SEQ ID NO: 2377 - DNA, 20 bp, Artificial Sequence
  Description of Artificial Sequence: Synthetic oligonucleotide
agtgtccaggatttgtccgg

SEQ ID NO: 2378 - DNA, 20 bp, Artificial Sequence
  Description of Artificial Sequence: Synthetic oligonucleotide
tgatgaaatgacaggctacg

SEQ ID NO: 2379 - DNA, 20 bp, Artificial Sequence
  Description of Artificial Sequence: Synthetic oligonucleotide
cacaaaaacggggttacgtg

SEQ ID NO: 2380 - DNA, 20 bp, Artificial Sequence
  Description of Artificial Sequence: Synthetic oligonucleotide
aagtaaccgcagttctctgt

SEQ ID NO: 2381 - DNA, 20 bp, Artificial Sequence
  Description of Artificial Sequence: Synthetic oligonucleotide
caaggcgagtaatacctgtc

SEQ ID NO: 2382 - DNA, 20 bp, Artificial Sequence
  Description of Artificial Sequence: Synthetic oligonucleotide
acgctaccttccaaaacacg

SEQ ID NO: 2383 - DNA, 20 bp, Artificial Sequence
  Description of Artificial Sequence: Synthetic oligonucleotide
gttggaaatctacttgatcg

SEQ ID NO: 2384 - DNA, 20 bp, Artificial Sequence
  Description of Artificial Sequence: Synthetic oligonucleotide
gctgccttacaacgagaagt

SEQ ID NO: 2385 - DNA, 20 bp, Artificial Sequence
  Description of Artificial Sequence: Synthetic oligonucleotide
gcttgctaatgctaccacca

SEQ ID NO: 2386 - DNA, 20 bp, Artificial Sequence
  Description of Artificial Sequence: Synthetic oligonucleotide
tgtttagggaggtacgactt

SEQ ID NO: 2387 - DNA, 20 bp, Artificial Sequence
  Description of Artificial Sequence: Synthetic oligonucleotide
accggattatatatcacctg

SEQ ID NO: 2388 - DNA, 20 bp, Artificial Sequence
  Description of Artificial Sequence: Synthetic oligonucleotide
agctgaacataaggccacaa

SEQ ID NO: 2389 - DNA, 20 bp, Artificial Sequence
  Description of Artificial Sequence: Synthetic oligonucleotide
tagtaggtaaatccgatgaa

SEQ ID NO: 2390 - DNA, 20 bp, Artificial Sequence
  Description of Artificial Sequence: Synthetic oligonucleotide
ggagaaaaacccaaatgccg

SEQ ID NO: 2391 - DNA, 20 bp, Artificial Sequence
  Description of Artificial Sequence: Synthetic oligonucleotide
ggtactgagagtatttgatg

SEQ ID NO: 2392 - DNA, 20 bp, Artificial Sequence
  Description of Artificial Sequence: Synthetic oligonucleotide
gaagattcgcaggaactccg

SEQ ID NO: 2393 - DNA, 20 bp, Artificial Sequence
  Description of Artificial Sequence: Synthetic oligonucleotide
tgcaccaactacacacacag

SEQ ID NO: 2394 - DNA, 20 bp, Artificial Sequence
  Description of Artificial Sequence: Synthetic oligonucleotide
catccggcagacgtacacgc

SEQ ID NO: 2395 - DNA, 20 bp, Artificial Sequence
  Description of Artificial Sequence: Synthetic oligonucleotide
ggtgctgaatgcctcccacg

SEQ ID NO: 2396 - DNA, 20 bp, Artificial Sequence
  Description of Artificial Sequence: Synthetic oligonucleotide
aagaacggcagggagttccg

SEQ ID NO: 2397 - DNA, 20 bp, Artificial Sequence
  Description of Artificial Sequence: Synthetic oligonucleotide
cccgagacagctcccatttg

SEQ ID NO: 2398 - DNA, 20 bp, Artificial Sequence
  Description of Artificial Sequence: Synthetic oligonucleotide
agtttacctgatagtccacg

SEQ ID NO: 2399 - DNA, 20 bp, Artificial Sequence
  Description of Artificial Sequence: Synthetic oligonucleotide
tgatatttgttccaccacga

SEQ ID NO: 2400 - DNA, 20 bp, Artificial Sequence
  Description of Artificial Sequence: Synthetic oligonucleotide
tagcaagcatgatctttcga

SEQ ID NO: 2401 - DNA, 20 bp, Artificial Sequence
  Description of Artificial Sequence: Synthetic oligonucleotide
tgtgcatgattcccttgctg

SEQ ID NO: 2402 - DNA, 20 bp, Artificial Sequence
  Description of Artificial Sequence: Synthetic oligonucleotide
ctctgagccatacctatccg

SEQ ID NO: 2403 - DNA, 20 bp, Artificial Sequence
  Description of Artificial Sequence: Synthetic oligonucleotide
gcggcggcgattgggtaccg

SEQ ID NO: 2404 - DNA, 20 bp, Artificial Sequence
  Description of Artificial Sequence: Synthetic oligonucleotide
tctggtttcatgatagcaag

SEQ ID NO: 2405 - DNA, 20 bp, Artificial Sequence
  Description of Artificial Sequence: Synthetic oligonucleotide
atagccttgtcagataagga

SEQ ID NO: 2406 - DNA, 20 bp, Artificial Sequence
  Description of Artificial Sequence: Synthetic oligonucleotide
gttgcccgccaacaaaacag

SEQ ID NO: 2407 - DNA, 20 bp, Artificial Sequence
  Description of Artificial Sequence: Synthetic oligonucleotide
ctggtcttaggcaaacccct

SEQ ID NO: 2408 - DNA, 20 bp, Artificial Sequence
  Description of Artificial Sequence: Synthetic oligonucleotide
agttcaaatgcccttccagt

SEQ ID NO: 2409 - DNA, 20 bp, Artificial Sequence
  Description of Artificial Sequence: Synthetic oligonucleotide
acagtgtgtaccttccagaa

SEQ ID NO: 2410 - DNA, 20 bp, Artificial Sequence
  Description of Artificial Sequence: Synthetic oligonucleotide
ctatattccttctaactacg

SEQ ID NO: 2411 - DNA, 20 bp, Artificial Sequence
  Description of Artificial Sequence: Synthetic oligonucleotide
agttgcggtctatctcccat

SEQ ID NO: 2412 - DNA, 20 bp, Artificial Sequence
  Description of Artificial Sequence: Synthetic oligonucleotide
gcagtgaaaacattaaaacc

SEQ ID NO: 2413 - DNA, 20 bp, Artificial Sequence
  Description of Artificial Sequence: Synthetic oligonucleotide
cactacaccaagacaagtga

SEQ ID NO: 2414 - DNA, 20 bp, Artificial Sequence
  Description of Artificial Sequence: Synthetic oligonucleotide
gggatggaactacattcttg

SEQ ID NO: 2415 - DNA, 20 bp, Artificial Sequence
  Description of Artificial Sequence: Synthetic oligonucleotide
ctgttccagcagcagaacac

SEQ ID NO: 2416 - DNA, 20 bp, Artificial Sequence
  Description of Artificial Sequence: Synthetic oligonucleotide
aatagtatcaagaagtacac

SEQ ID NO: 2417 - DNA, 20 bp, Artificial Sequence
  Description of Artificial Sequence: Synthetic oligonucleotide
cagaggagtctcttcccaag

SEQ ID NO: 2418 - DNA, 20 bp, Artificial Sequence
  Description of Artificial Sequence: Synthetic oligonucleotide
aactacctttctacggacgt

SEQ ID NO: 2419 - DNA, 20 bp, Artificial Sequence
  Description of Artificial Sequence: Synthetic oligonucleotide
ttgggatcctcatcaagcga

SEQ ID NO: 2420 - DNA, 20 bp, Artificial Sequence
  Description of Artificial Sequence: Synthetic oligonucleotide
tcatcgctcacaaccaagtg

SEQ ID NO: 2421 - DNA, 20 bp, Artificial Sequence
  Description of Artificial Sequence: Synthetic oligonucleotide
gttacctatacatctcagca

SEQ ID NO: 2422 - DNA, 20 bp, Artificial Sequence
  Description of Artificial Sequence: Synthetic oligonucleotide
ttaattcgcctaagagaacg

SEQ ID NO: 2423 - DNA, 20 bp, Artificial Sequence
  Description of Artificial Sequence: Synthetic oligonucleotide
ttccgatgactcatcaagtg

SEQ ID NO: 2424 - DNA, 20 bp, Artificial Sequence
  Description of Artificial Sequence: Synthetic oligonucleotide
aagcagccatcctatattgg

SEQ ID NO: 2425 - DNA, 20 bp, Artificial Sequence
  Description of Artificial Sequence: Synthetic oligonucleotide
atgcccaatttagacctcca

SEQ ID NO: 2426 - DNA, 20 bp, Artificial Sequence
  Description of Artificial Sequence: Synthetic oligonucleotide
tctggcccatcagttcacac

SEQ ID NO: 2427 - DNA, 20 bp, Artificial Sequence
  Description of Artificial Sequence: Synthetic oligonucleotide
tcagaccgtaccttgcaaca

SEQ ID NO: 2428 - DNA, 20 bp, Artificial Sequence
  Description of Artificial Sequence: Synthetic oligonucleotide
cttgacgcatcgcgccagga

SEQ ID NO: 2429 - DNA, 20 bp, Artificial Sequence
  Description of Artificial Sequence: Synthetic oligonucleotide
tcgcggtggtcgtcccgagg

SEQ ID NO: 2430 - DNA, 20 bp, Artificial Sequence
  Description of Artificial Sequence: Synthetic oligonucleotide
gaagcccctgaagacatacg

SEQ ID NO: 2431 - DNA, 20 bp, Artificial Sequence
  Description of Artificial Sequence: Synthetic oligonucleotide
cacacacccgtatggcaaag

SEQ ID NO: 2432 - DNA, 20 bp, Artificial Sequence
  Description of Artificial Sequence: Synthetic oligonucleotide
tcacggagaaaccctcggtg

SEQ ID NO: 2433 - DNA, 20 bp, Artificial Sequence
  Description of Artificial Sequence: Synthetic oligonucleotide
ctggtgcgggtcagtccgtg

SEQ ID NO: 2434 - DNA, 20 bp, Artificial Sequence
  Description of Artificial Sequence: Synthetic oligonucleotide
aatggggcattataacaacg

SEQ ID NO: 2435 - DNA, 20 bp, Artificial Sequence
  Description of Artificial Sequence: Synthetic oligonucleotide
cagctactagagataccgca

SEQ ID NO: 2436 - DNA, 20 bp, Artificial Sequence
  Description of Artificial Sequence: Synthetic oligonucleotide
cagtctgtgaaaggacgctg

SEQ ID NO: 2437 - DNA, 20 bp, Artificial Sequence
  Description of Artificial Sequence: Synthetic oligonucleotide
gaagattatgtaatggcgag

SEQ ID NO: 2438 - DNA, 20 bp, Artificial Sequence
  Description of Artificial Sequence: Synthetic oligonucleotide
gcaccgcttgtggaccacgc

SEQ ID NO: 2439 - DNA, 20 bp, Artificial Sequence
  Description of Artificial Sequence: Synthetic oligonucleotide
gccttgtcatttgacaaccg

SEQ ID NO: 2440 - DNA, 20 bp, Artificial Sequence
  Description of Artificial Sequence: Synthetic oligonucleotide
ccacgttggtctcacatcga

SEQ ID NO: 2441 - DNA, 20 bp, Artificial Sequence
  Description of Artificial Sequence: Synthetic oligonucleotide
atgtgatcatcgatctctca

SEQ ID NO: 2442 - DNA, 20 bp, Artificial Sequence
  Description of Artificial Sequence: Synthetic oligonucleotide
gtgcccggaagtacccgacg

SEQ ID NO: 2443 - DNA, 20 bp, Artificial Sequence
  Description of Artificial Sequence: Synthetic oligonucleotide
cttccgggtgagatgctccg

SEQ ID NO: 2444 - DNA, 20 bp, Artificial Sequence
  Description of Artificial Sequence: Synthetic oligonucleotide
ctgcacgtcacacacttcgt

SEQ ID NO: 2445 - DNA, 20 bp, Artificial Sequence
  Description of Artificial Sequence: Synthetic oligonucleotide
tgtctgacatccgggtgacg

SEQ ID NO: 2446 - DNA, 20 bp, Artificial Sequence
  Description of Artificial Sequence: Synthetic oligonucleotide
gctgtcttgctgcctcacgg

SEQ ID NO: 2447 - DNA, 20 bp, Artificial Sequence
  Description of Artificial Sequence: Synthetic oligonucleotide
caaactcactttcagtcccg

SEQ ID NO: 2448 - DNA, 20 bp, Artificial Sequence
  Description of Artificial Sequence: Synthetic oligonucleotide
tgtttccatcctcccacgga

SEQ ID NO: 2449 - DNA, 20 bp, Artificial Sequence
  Description of Artificial Sequence: Synthetic oligonucleotide
tggcttctcagctttaaaag

SEQ ID NO: 2450 - DNA, 20 bp, Artificial Sequence
  Description of Artificial Sequence: Synthetic oligonucleotide
tttgtactgatacaccatgt

SEQ ID NO: 2451 - DNA, 20 bp, Artificial Sequence
  Description of Artificial Sequence: Synthetic oligonucleotide
gcttcatggaacaaccaccc

SEQ ID NO: 2452 - DNA, 20 bp, Artificial Sequence
  Description of Artificial Sequence: Synthetic oligonucleotide
ccgctaccggtgaaccagcg

SEQ ID NO: 2453 - DNA, 20 bp, Artificial Sequence
  Description of Artificial Sequence: Synthetic oligonucleotide
atctgtggctgggataagag

SEQ ID NO: 2454 - DNA, 20 bp, Artificial Sequence
  Description of Artificial Sequence: Synthetic oligonucleotide
ttggagtgatcggcccccag

SEQ ID NO: 2455 - DNA, 20 bp, Artificial Sequence
  Description of Artificial Sequence: Synthetic oligonucleotide
agagctcttacctacaacat

SEQ ID NO: 2456 - DNA, 20 bp, Artificial Sequence
  Description of Artificial Sequence: Synthetic oligonucleotide
ggagctgagagataaccagc

SEQ ID NO: 2457 - DNA, 20 bp, Artificial Sequence
  Description of Artificial Sequence: Synthetic oligonucleotide
gagacacttactgactgcct

SEQ ID NO: 2458 - DNA, 20 bp, Artificial Sequence
  Description of Artificial Sequence: Synthetic oligonucleotide
acacccctccattaacacat

SEQ ID NO: 2459 - DNA, 20 bp, Artificial Sequence
  Description of Artificial Sequence: Synthetic oligonucleotide
gctgccattgtataggcatg

SEQ ID NO: 2460 - DNA, 20 bp, Artificial Sequence
  Description of Artificial Sequence: Synthetic oligonucleotide
tgtgtcagcctggctattcg

SEQ ID NO: 2461 - DNA, 20 bp, Artificial Sequence
  Description of Artificial Sequence: Synthetic oligonucleotide
ggaggcctctgtgtcgacag

SEQ ID NO: 2462 - DNA, 20 bp, Artificial Sequence
  Description of Artificial Sequence: Synthetic oligonucleotide
ctgggagcagctctacacag

SEQ ID NO: 2463 - DNA, 20 bp, Artificial Sequence
  Description of Artificial Sequence: Synthetic oligonucleotide
atgggcagcaagaccctgcg

SEQ ID NO: 2464 - DNA, 20 bp, Artificial Sequence
  Description of Artificial Sequence: Synthetic oligonucleotide
tgtgacatccccactcctgg

SEQ ID NO: 2465 - DNA, 20 bp, Artificial Sequence
  Description of Artificial Sequence: Synthetic oligonucleotide
tccagcagagtcttcacgga

SEQ ID NO: 2466 - DNA, 20 bp, Artificial Sequence
  Description of Artificial Sequence: Synthetic oligonucleotide
gctgatcgagaatgtcctag

SEQ ID NO: 2467 - DNA, 20 bp, Artificial Sequence
  Description of Artificial Sequence: Synthetic oligonucleotide
gctgacgacacccacctatg

SEQ ID NO: 2468 - DNA, 20 bp, Artificial Sequence
  Description of Artificial Sequence: Synthetic oligonucleotide
tgtggtggagccctacaacg

SEQ ID NO: 2469 - DNA, 20 bp, Artificial Sequence
  Description of Artificial Sequence: Synthetic oligonucleotide
gctcatgaacaagattagag

SEQ ID NO: 2470 - DNA, 20 bp, Artificial Sequence
  Description of Artificial Sequence: Synthetic oligonucleotide
cactggaagtaggaggcgcg

SEQ ID NO: 2471 - DNA, 20 bp, Artificial Sequence
  Description of Artificial Sequence: Synthetic oligonucleotide
accaaggcctgtcggtcacg

SEQ ID NO: 2472 - DNA, 20 bp, Artificial Sequence
  Description of Artificial Sequence: Synthetic oligonucleotide
acacacgcacccgcaactgg

SEQ ID NO: 2473 - DNA, 20 bp, Artificial Sequence
  Description of Artificial Sequence: Synthetic oligonucleotide
catgtgcaatcacagcagcc

SEQ ID NO: 2474 - DNA, 20 bp, Artificial Sequence
  Description of Artificial Sequence: Synthetic oligonucleotide
atggtcgtgacagtactcca

SEQ ID NO: 2475 - DNA, 20 bp, Artificial Sequence
  Description of Artificial Sequence: Synthetic oligonucleotide
gcatcgagtcaccaaaacgc

SEQ ID NO: 2476 - DNA, 20 bp, Artificial Sequence
  Description of Artificial Sequence: Synthetic oligonucleotide
ccggggacacttacatggcg

SEQ ID NO: 2477 - DNA, 20 bp, Artificial Sequence
  Description of Artificial Sequence: Synthetic oligonucleotide
cccctcaaagacttccgggg

SEQ ID NO: 2478 - DNA, 20 bp, Artificial Sequence
  Description of Artificial Sequence: Synthetic oligonucleotide
aaaaatgcgcaaattcagcg

SEQ ID NO: 2479 - DNA, 20 bp, Artificial Sequence
  Description of Artificial Sequence: Synthetic oligonucleotide
tgtagcgtgggtaaatacga

SEQ ID NO: 2480 - DNA, 20 bp, Artificial Sequence
  Description of Artificial Sequence: Synthetic oligonucleotide
aaagagcacttggtaatcgg

SEQ ID NO: 2481 - DNA, 20 bp, Artificial Sequence
  Description of Artificial Sequence: Synthetic oligonucleotide
taaaaccatcgtaagctcag

SEQ ID NO: 2482 - DNA, 20 bp, Artificial Sequence
  Description of Artificial Sequence: Synthetic oligonucleotide
acgttcacccgtcactagtg

SEQ ID NO: 2483 - DNA, 20 bp, Artificial Sequence
  Description of Artificial Sequence: Synthetic oligonucleotide
tatgccctgtacttacagtg

SEQ ID NO: 2484 - DNA, 20 bp, Artificial Sequence
  Description of Artificial Sequence: Synthetic oligonucleotide
gccgggtgcgctgttacaca

SEQ ID NO: 2485 - DNA, 20 bp, Artificial Sequence
  Description of Artificial Sequence: Synthetic oligonucleotide
aggcctgcttagcaagtgcg

SEQ ID NO: 2486 - DNA, 20 bp, Artificial Sequence
  Description of Artificial Sequence: Synthetic oligonucleotide
gtccggcattacaactacac

SEQ ID NO: 2487 - DNA, 20 bp, Artificial Sequence
  Description of Artificial Sequence: Synthetic oligonucleotide
acaagctcactcccgcccag

SEQ ID NO: 2488 - DNA, 20 bp, Artificial Sequence
  Description of Artificial Sequence: Synthetic oligonucleotide
tctgcagtacagaatgacga

SEQ ID NO: 2489 - DNA, 20 bp, Artificial Sequence
  Description of Artificial Sequence: Synthetic oligonucleotide
caataaaatagtacatgggt

SEQ ID NO: 2490 - DNA, 20 bp, Artificial Sequence
  Description of Artificial Sequence: Synthetic oligonucleotide
tcagaatccatctaccgtag

SEQ ID NO: 2491 - DNA, 20 bp, Artificial Sequence
  Description of Artificial Sequence: Synthetic oligonucleotide
tgtctcgaacctcattgcaa

SEQ ID NO: 2492 - DNA, 20 bp, Artificial Sequence
  Description of Artificial Sequence: Synthetic oligonucleotide
atctgcacagaccgaatatg

SEQ ID NO: 2493 - DNA, 20 bp, Artificial Sequence
  Description of Artificial Sequence: Synthetic oligonucleotide
agcaagaatgcagcccaaca

SEQ ID NO: 2494 - DNA, 20 bp, Artificial Sequence
  Description of Artificial Sequence: Synthetic oligonucleotide
ggctacgtggaaacccctcg

SEQ ID NO: 2495 - DNA, 20 bp, Artificial Sequence
  Description of Artificial Sequence: Synthetic oligonucleotide
tgagatgatcgacgtcatcg

SEQ ID NO: 2496 - DNA, 20 bp, Artificial Sequence
  Description of Artificial Sequence: Synthetic oligonucleotide
ccgtgtcattgcccacaccc

SEQ ID NO: 2497 - DNA, 20 bp, Artificial Sequence
  Description of Artificial Sequence: Synthetic oligonucleotide
ccaccgaggcctgcgcaagg

SEQ ID NO: 2498 - DNA, 20 bp, Artificial Sequence
  Description of Artificial Sequence: Synthetic oligonucleotide
agcccactagccgatacttg

SEQ ID NO: 2499 - DNA, 20 bp, Artificial Sequence
  Description of Artificial Sequence: Synthetic oligonucleotide
gatgctcgtggaacgactag

SEQ ID NO: 2500 - DNA, 20 bp, Artificial Sequence
  Description of Artificial Sequence: Synthetic oligonucleotide
ggaaatcgtcccctataaca

SEQ ID NO: 2501 - DNA, 20 bp, Artificial Sequence
  Description of Artificial Sequence: Synthetic oligonucleotide
cctgtggaatgatagcagta

SEQ ID NO: 2502 - DNA, 20 bp, Artificial Sequence
  Description of Artificial Sequence: Synthetic oligonucleotide
tgtgctgagttccattaccg

SEQ ID NO: 2503 - DNA, 20 bp, Artificial Sequence
  Description of Artificial Sequence: Synthetic oligonucleotide
aggacacgcagcgatctagg

SEQ ID NO: 2504 - DNA, 20 bp, Artificial Sequence
  Description of Artificial Sequence: Synthetic oligonucleotide
gcttccagtgctgagtacgt

SEQ ID NO: 2505 - DNA, 20 bp, Artificial Sequence
  Description of Artificial Sequence: Synthetic oligonucleotide
cctctaggataaggataatg

SEQ ID NO: 2506 - DNA, 20 bp, Artificial Sequence
  Description of Artificial Sequence: Synthetic oligonucleotide
cttgtaccccaattccaatg

SEQ ID NO: 2507 - DNA, 20 bp, Artificial Sequence
  Description of Artificial Sequence: Synthetic oligonucleotide
cctacctagaaagttgtggg

SEQ ID NO: 2508 - DNA, 20 bp, Artificial Sequence
  Description of Artificial Sequence: Synthetic oligonucleotide
tggcaaacactctcccatgg

SEQ ID NO: 2509 - DNA, 20 bp, Artificial Sequence
  Description of Artificial Sequence: Synthetic oligonucleotide
ggatctcttcatgaaacgag

SEQ ID NO: 2510 - DNA, 20 bp, Artificial Sequence
  Description of Artificial Sequence: Synthetic oligonucleotide
ctagttggtgaggatagcca

SEQ ID NO: 2511 - DNA, 20 bp, Artificial Sequence
  Description of Artificial Sequence: Synthetic oligonucleotide
agtcacatgtggtggaatgg

SEQ ID NO: 2512 - DNA, 20 bp, Artificial Sequence
  Description of Artificial Sequence: Synthetic oligonucleotide
agacattgtaaaagaccctg

SEQ ID NO: 2513 - DNA, 20 bp, Artificial Sequence
  Description of Artificial Sequence: Synthetic oligonucleotide
gattgatcatgagcacagaa

SEQ ID NO: 2514 - DNA, 20 bp, Artificial Sequence
  Description of Artificial Sequence: Synthetic oligonucleotide
atccggaccctggacaacgg

SEQ ID NO: 2515 - DNA, 20 bp, Artificial Sequence
  Description of Artificial Sequence: Synthetic oligonucleotide
aatggcctcgtaatcataca

SEQ ID NO: 2516 - DNA, 20 bp, Artificial Sequence
  Description of Artificial Sequence: Synthetic oligonucleotide
atgtattgcctccgacctgg

SEQ ID NO: 2517 - DNA, 20 bp, Artificial Sequence
  Description of Artificial Sequence: Synthetic oligonucleotide
ccagcttgagggattcccga

SEQ ID NO: 2518 - DNA, 20 bp, Artificial Sequence
  Description of Artificial Sequence: Synthetic oligonucleotide
cttacccgtaccagtagcga

SEQ ID NO: 2519 - DNA, 20 bp, Artificial Sequence
  Description of Artificial Sequence: Synthetic oligonucleotide
gcatcagcgtgtcatacacg

SEQ ID NO: 2520 - DNA, 20 bp, Artificial Sequence
  Description of Artificial Sequence: Synthetic oligonucleotide
ggggctgacttaccgcagag

SEQ ID NO: 2521 - DNA, 20 bp, Artificial Sequence
  Description of Artificial Sequence: Synthetic oligonucleotide
ggagcccattgagagcgatg

SEQ ID NO: 2522 - DNA, 20 bp, Artificial Sequence
  Description of Artificial Sequence: Synthetic oligonucleotide
tgtgtttaaccagagatccg

SEQ ID NO: 2523 - DNA, 20 bp, Artificial Sequence
  Description of Artificial Sequence: Synthetic oligonucleotide
gaggcagaatgtgctaccag

SEQ ID NO: 2524 - DNA, 20 bp, Artificial Sequence
  Description of Artificial Sequence: Synthetic oligonucleotide
tacgcttggcccattcaacg

SEQ ID NO: 2525 - DNA, 20 bp, Artificial Sequence
  Description of Artificial Sequence: Synthetic oligonucleotide
cttcaagaggacgataagga

SEQ ID NO: 2526 - DNA, 20 bp, Artificial Sequence
  Description of Artificial Sequence: Synthetic oligonucleotide
aagcagggtttgtacactcg

SEQ ID NO: 2527 - DNA, 20 bp, Artificial Sequence
  Description of Artificial Sequence: Synthetic oligonucleotide
gtggattgacccaaaccgaa

SEQ ID NO: 2528 - DNA, 20 bp, Artificial Sequence
  Description of Artificial Sequence: Synthetic oligonucleotide
aaggccgtctgagaaagtca

SEQ ID NO: 2529 - DNA, 20 bp, Artificial Sequence
  Description of Artificial Sequence: Synthetic oligonucleotide
gtgttattaataaagtcacc

SEQ ID NO: 2530 - DNA, 20 bp, Artificial Sequence
  Description of Artificial Sequence: Synthetic oligonucleotide
aagaggagtacagtgcaatg

SEQ ID NO: 2531 - DNA, 20 bp, Artificial Sequence
  Description of Artificial Sequence: Synthetic oligonucleotide
agatattcaccattataggt

SEQ ID NO: 2532 - DNA, 20 bp, Artificial Sequence
  Description of Artificial Sequence: Synthetic oligonucleotide
ctgaattagctgtatcgtca

SEQ ID NO: 2533 - DNA, 20 bp, Artificial Sequence
  Description of Artificial Sequence: Synthetic oligonucleotide
gatgtacctatggtcctagt

SEQ ID NO: 2534 - DNA, 20 bp, Artificial Sequence
  Description of Artificial Sequence: Synthetic oligonucleotide
ggtttccaccattagcacgc

SEQ ID NO: 2535 - DNA, 20 bp, Artificial Sequence
  Description of Artificial Sequence: Synthetic oligonucleotide
ttgatgtcaccggagttgtg

SEQ ID NO: 2536 - DNA, 20 bp, Artificial Sequence
  Description of Artificial Sequence: Synthetic oligonucleotide
ggtgaagcggaagcgcatcg

SEQ ID NO: 2537 - DNA, 20 bp, Artificial Sequence
  Description of Artificial Sequence: Synthetic oligonucleotide
gaatggtggccaggtcacct

SEQ ID NO: 2538 - DNA, 20 bp, Artificial Sequence
  Description of Artificial Sequence: Synthetic oligonucleotide
tctcactttcaaggtccaag

SEQ ID NO: 2539 - DNA, 20 bp, Artificial Sequence
  Description of Artificial Sequence: Synthetic oligonucleotide
cagagctcagtcatcctggg

SEQ ID NO: 2540 - DNA, 20 bp, Artificial Sequence
  Description of Artificial Sequence: Synthetic oligonucleotide
aagacgagtctggttgatgg

SEQ ID NO: 2541 - DNA, 20 bp, Artificial Sequence
  Description of Artificial Sequence: Synthetic oligonucleotide
acctccacggggtcccacag

SEQ ID NO: 2542 - DNA, 20 bp, Artificial Sequence
  Description of Artificial Sequence: Synthetic oligonucleotide
ggttcccaaggacctatatg

SEQ ID NO: 2543 - DNA, 20 bp, Artificial Sequence
  Description of Artificial Sequence: Synthetic oligonucleotide
actgcttgtccagatgactt

SEQ ID NO: 2544 - DNA, 20 bp, Artificial Sequence
  Description of Artificial Sequence: Synthetic oligonucleotide
acatgtcagttcatgttcag

SEQ ID NO: 2545 - DNA, 20 bp, Artificial Sequence
  Description of Artificial Sequence: Synthetic oligonucleotide
caccaccaattccaagagag

SEQ ID NO: 2546 - DNA, 20 bp, Artificial Sequence
  Description of Artificial Sequence: Synthetic oligonucleotide
tggaatagcagagactccgg

SEQ ID NO: 2547 - DNA, 20 bp, Artificial Sequence
  Description of Artificial Sequence: Synthetic oligonucleotide
ctaaataactgtgaactcgg

SEQ ID NO: 2548 - DNA, 20 bp, Artificial Sequence
  Description of Artificial Sequence: Synthetic oligonucleotide
tttctgaaacaggatcgtgt

SEQ ID NO: 2549 - DNA, 20 bp, Artificial Sequence
  Description of Artificial Sequence: Synthetic oligonucleotide
tgagaagtcatccggtcatg

SEQ ID NO: 2550 - DNA, 20 bp, Artificial Sequence
  Description of Artificial Sequence: Synthetic oligonucleotide
agtgagctctcaaaaaacgt

SEQ ID NO: 2551 - DNA, 20 bp, Artificial Sequence
  Description of Artificial Sequence: Synthetic oligonucleotide
tagtcgaatggctaaaccag

SEQ ID NO: 2552 - DNA, 20 bp, Artificial Sequence
  Description of Artificial Sequence: Synthetic oligonucleotide
tctcagggaaactcttatgg

SEQ ID NO: 2553 - DNA, 20 bp, Artificial Sequence
  Description of Artificial Sequence: Synthetic oligonucleotide
tcacaccagcaatctcagtg

SEQ ID NO: 2554 - DNA, 20 bp, Artificial Sequence
  Description of Artificial Sequence: Synthetic oligonucleotide
acttaaccctctcacagcag

SEQ ID NO: 2555 - DNA, 20 bp, Artificial Sequence
  Description of Artificial Sequence: Synthetic oligonucleotide
tggcggcggacttctaccac

SEQ ID NO: 2556 - DNA, 20 bp, Artificial Sequence
  Description of Artificial Sequence: Synthetic oligonucleotide
gagaatacgtcctccacatg

SEQ ID NO: 2557 - DNA, 20 bp, Artificial Sequence
  Description of Artificial Sequence: Synthetic oligonucleotide
ttgcctctacaaaaactgtg

SEQ ID NO: 2558 - DNA, 20 bp, Artificial Sequence
  Description of Artificial Sequence: Synthetic oligonucleotide
tgagttgcattgtgaacgag

SEQ ID NO: 2559 - DNA, 20 bp, Artificial Sequence
  Description of Artificial Sequence: Synthetic oligonucleotide
tcttaaataggtgcgatgca

SEQ ID NO: 2560 - DNA, 20 bp, Artificial Sequence
  Description of Artificial Sequence: Synthetic oligonucleotide
aaacgaagctgtcttagagt

SEQ ID NO: 2561 - DNA, 20 bp, Artificial Sequence
  Description of Artificial Sequence: Synthetic oligonucleotide
gatctgatgtaaccttccca

SEQ ID NO: 2562 - DNA, 20 bp, Artificial Sequence
  Description of Artificial Sequence: Synthetic oligonucleotide
atgtgcgcttggaatccaag

SEQ ID NO: 2563 - DNA, 20 bp, Artificial Sequence
  Description of Artificial Sequence: Synthetic oligonucleotide
tctacagattattcaggaca

SEQ ID NO: 2564 - DNA, 20 bp, Artificial Sequence
  Description of Artificial Sequence: Synthetic oligonucleotide
ttccaagggagtgaaaatct

SEQ ID NO: 2565 - DNA, 20 bp, Artificial Sequence
  Description of Artificial Sequence: Synthetic oligonucleotide
accaaacgtgtgttctggaa

SEQ ID NO: 2566 - DNA, 20 bp, Artificial Sequence
  Description of Artificial Sequence: Synthetic oligonucleotide
actccttggctagtacactt

SEQ ID NO: 2567 - DNA, 20 bp, Artificial Sequence
  Description of Artificial Sequence: Synthetic oligonucleotide
aaaggcaggtatagcaactg

SEQ ID NO: 2568 - DNA, 20 bp, Artificial Sequence
  Description of Artificial Sequence: Synthetic oligonucleotide
ctacgaccctttatattgtg

SEQ ID NO: 2569 - DNA, 20 bp, Artificial Sequence
  Description of Artificial Sequence: Synthetic oligonucleotide
gccatgaggattcctttatg

SEQ ID NO: 2570 - DNA, 20 bp, Artificial Sequence
  Description of Artificial Sequence: Synthetic oligonucleotide
gctccgtgataaagtcgaag

SEQ ID NO: 2571 - DNA, 20 bp, Artificial Sequence
  Description of Artificial Sequence: Synthetic oligonucleotide
ggcttcggcacggtctacgc

SEQ ID NO: 2572 - DNA, 20 bp, Artificial Sequence
  Description of Artificial Sequence: Synthetic oligonucleotide
gactggttcgagcggcccga

SEQ ID NO: 2573 - DNA, 20 bp, Artificial Sequence
  Description of Artificial Sequence: Synthetic oligonucleotide
acggtctacaccgacttcga

SEQ ID NO: 2574 - DNA, 20 bp, Artificial Sequence
  Description of Artificial Sequence: Synthetic oligonucleotide
caggctgcttaggaataacg

SEQ ID NO: 2575 - DNA, 20 bp, Artificial Sequence
  Description of Artificial Sequence: Synthetic oligonucleotide
tggaacaggacacatactgg

SEQ ID NO: 2576 - DNA, 20 bp, Artificial Sequence
  Description of Artificial Sequence: Synthetic oligonucleotide
acacaaagaccgttggccag

SEQ ID NO: 2577 - DNA, 20 bp, Artificial Sequence
  Description of Artificial Sequence: Synthetic oligonucleotide
tgttgaacataaggctccgg

SEQ ID NO: 2578 - DNA, 20 bp, Artificial Sequence
  Description of Artificial Sequence: Synthetic oligonucleotide
aggctcgcaagtactttgaa

SEQ ID NO: 2579 - DNA, 20 bp, Artificial Sequence
  Description of Artificial Sequence: Synthetic oligonucleotide
gatgaagtactatataggtg

SEQ ID NO: 2580 - DNA, 20 bp, Artificial Sequence
  Description of Artificial Sequence: Synthetic oligonucleotide
cacagagagcttacgcagcg

SEQ ID NO: 2581 - DNA, 20 bp, Artificial Sequence
  Description of Artificial Sequence: Synthetic oligonucleotide
catgactacatcgtgcgcag

SEQ ID NO: 2582 - DNA, 20 bp, Artificial Sequence
  Description of Artificial Sequence: Synthetic oligonucleotide
caggcgacgagtttgaactg

SEQ ID NO: 2583 - DNA, 20 bp, Artificial Sequence
  Description of Artificial Sequence: Synthetic oligonucleotide
gaccccagtttaccccatcc

SEQ ID NO: 2584 - DNA, 20 bp, Artificial Sequence
  Description of Artificial Sequence: Synthetic oligonucleotide
cagtggctccattcaccgcg

SEQ ID NO: 2585 - DNA, 20 bp, Artificial Sequence
  Description of Artificial Sequence: Synthetic oligonucleotide
ctccgattcagtcccttctg

SEQ ID NO: 2586 - DNA, 20 bp, Artificial Sequence
  Description of Artificial Sequence: Synthetic oligonucleotide
acagccacagtccggcacgt

SEQ ID NO: 2587 - DNA, 20 bp, Artificial Sequence
  Description of Artificial Sequence: Synthetic oligonucleotide
aggttgagggataccatatg

SEQ ID NO: 2588 - DNA, 20 bp, Artificial Sequence
  Description of Artificial Sequence: Synthetic oligonucleotide
cttaccatatatatgcactg

SEQ ID NO: 2589 - DNA, 20 bp, Artificial Sequence
  Description of Artificial Sequence: Synthetic oligonucleotide
tggccactgtgtgatcactg

SEQ ID NO: 2590 - DNA, 20 bp, Artificial Sequence
  Description of Artificial Sequence: Synthetic oligonucleotide
gaggaggttcacatgatatg

SEQ ID NO: 2591 - DNA, 20 bp, Artificial Sequence
  Description of Artificial Sequence: Synthetic oligonucleotide
tttataagatgcgaaatggt

SEQ ID NO: 2592 - DNA, 20 bp, Artificial Sequence
  Description of Artificial Sequence: Synthetic oligonucleotide
aagatattactcctgtgtgt

SEQ ID NO: 2593 - DNA, 20 bp, Artificial Sequence
  Description of Artificial Sequence: Synthetic oligonucleotide
agggccagcgctgtattaca

SEQ ID NO: 2594 - DNA, 20 bp, Artificial Sequence
  Description of Artificial Sequence: Synthetic oligonucleotide
atgtgctcaatgaagtcatg

SEQ ID NO: 2595 - DNA, 20 bp, Artificial Sequence
  Description of Artificial Sequence: Synthetic oligonucleotide
tgaaggtctgagcatgcttg

SEQ ID NO: 2596 - DNA, 20 bp, Artificial Sequence
  Description of Artificial Sequence: Synthetic oligonucleotide
actcccattataggtctgtg

SEQ ID NO: 2597 - DNA, 20 bp, Artificial Sequence
  Description of Artificial Sequence: Synthetic oligonucleotide
cacttgaagtaggagcactg

SEQ ID NO: 2598 - DNA, 20 bp, Artificial Sequence
  Description of Artificial Sequence: Synthetic oligonucleotide
gcccgcgacttgaagaacgg

SEQ ID NO: 2599 - DNA, 20 bp, Artificial Sequence
  Description of Artificial Sequence: Synthetic oligonucleotide
aacactccagagatccacgg

SEQ ID NO: 2600 - DNA, 20 bp, Artificial Sequence
  Description of Artificial Sequence: Synthetic oligonucleotide
tggctcacctgaccacgttg

SEQ ID NO: 2601 - DNA, 20 bp, Artificial Sequence
  Description of Artificial Sequence: Synthetic oligonucleotide
cattgcaggtcgtcacgctg

SEQ ID NO: 2602 - DNA, 20 bp, Artificial Sequence
  Description of Artificial Sequence: Synthetic oligonucleotide
taatgtacacgactccatgt

SEQ ID NO: 2603 - DNA, 20 bp, Artificial Sequence
  Description of Artificial Sequence: Synthetic oligonucleotide
ccaatcacacaattaaagcg

SEQ ID NO: 2604 - DNA, 20 bp, Artificial Sequence
  Description of Artificial Sequence: Synthetic oligonucleotide
cagcctctgccaatccatgt

SEQ ID NO: 2605 - DNA, 20 bp, Artificial Sequence
  Description of Artificial Sequence: Synthetic oligonucleotide
caagaactgaactaaatgtg

SEQ ID NO: 2606 - DNA, 20 bp, Artificial Sequence
  Description of Artificial Sequence: Synthetic oligonucleotide
agtcgatttcaatctcgtcg

SEQ ID NO: 2607 - DNA, 20 bp, Artificial Sequence
  Description of Artificial Sequence: Synthetic oligonucleotide
agtcgaactgtcactgtccg

SEQ ID NO: 2608 - DNA, 20 bp, Artificial Sequence
  Description of Artificial Sequence: Synthetic oligonucleotide
ccagacccctgtcatgacag

SEQ ID NO: 2609 - DNA, 20 bp, Artificial Sequence
  Description of Artificial Sequence: Synthetic oligonucleotide
caccaaactcctgagcatca

SEQ ID NO: 2610 - DNA, 20 bp, Artificial Sequence
  Description of Artificial Sequence: Synthetic oligonucleotide
gtgttcaatgaaatcgtgcg

SEQ ID NO: 2611 - DNA, 20 bp, Artificial Sequence
  Description of Artificial Sequence: Synthetic oligonucleotide
ggttggcatcggggtacgcg

SEQ ID NO: 2612 - DNA, 20 bp, Artificial Sequence
  Description of Artificial Sequence: Synthetic oligonucleotide
cgtgcctccgtaggtctgcg

SEQ ID NO: 2613 - DNA, 20 bp, Artificial Sequence
  Description of Artificial Sequence: Synthetic oligonucleotide
agaggccacgaacatgcaag

SEQ ID NO: 2614 - DNA, 20 bp, Artificial Sequence
  Description of Artificial Sequence: Synthetic oligonucleotide
ctccaccgcagacatgacga

SEQ ID NO: 2615 - DNA, 20 bp, Artificial Sequence
  Description of Artificial Sequence: Synthetic oligonucleotide
aagtgctagtagtaaaaccg

SEQ ID NO: 2616 - DNA, 20 bp, Artificial Sequence
  Description of Artificial Sequence: Synthetic oligonucleotide
tgtcggcaaagctctatgga

SEQ ID NO: 2617 - DNA, 20 bp, Artificial Sequence
  Description of Artificial Sequence: Synthetic oligonucleotide
gacctcatgagggctgacat

SEQ ID NO: 2618 - DNA, 20 bp, Artificial Sequence
  Description of Artificial Sequence: Synthetic oligonucleotide
ccagagctcgctttaccccg

SEQ ID NO: 2619 - DNA, 20 bp, Artificial Sequence
  Description of Artificial Sequence: Synthetic oligonucleotide
aaggaacgttcagattgaga

SEQ ID NO: 2620 - DNA, 20 bp, Artificial Sequence
  Description of Artificial Sequence: Synthetic oligonucleotide
actaatgtaggacccagctg

SEQ ID NO: 2621 - DNA, 20 bp, Artificial Sequence
  Description of Artificial Sequence: Synthetic oligonucleotide
tggagaacgtatttcagtgt

SEQ ID NO: 2622 - DNA, 20 bp, Artificial Sequence
  Description of Artificial Sequence: Synthetic oligonucleotide
atgttgggggtacattcagg

SEQ ID NO: 2623 - DNA, 20 bp, Artificial Sequence
  Description of Artificial Sequence: Synthetic oligonucleotide
ttatcagaaggaaatttccg

SEQ ID NO: 2624 - DNA, 20 bp, Artificial Sequence
  Description of Artificial Sequence: Synthetic oligonucleotide
ttatgatgggaaagtacacg

SEQ ID NO: 2625 - DNA, 20 bp, Artificial Sequence
  Description of Artificial Sequence: Synthetic oligonucleotide
cttctgtgagctcattgcgc

SEQ ID NO: 2626 - DNA, 20 bp, Artificial Sequence
  Description of Artificial Sequence: Synthetic oligonucleotide
aataaatcaaggtcataacc

SEQ ID NO: 2627 - DNA, 20 bp, Artificial Sequence
  Description of Artificial Sequence: Synthetic oligonucleotide
ctgtccataattagtccatg

SEQ ID NO: 2628 - DNA, 20 bp, Artificial Sequence
  Description of Artificial Sequence: Synthetic oligonucleotide
actagaatgaccagtcaaca

SEQ ID NO: 2629 - DNA, 20 bp, Artificial Sequence
  Description of Artificial Sequence: Synthetic oligonucleotide
cacagagggctacaatgtga

SEQ ID NO: 2630 - DNA, 20 bp, Artificial Sequence
  Description of Artificial Sequence: Synthetic oligonucleotide
gtgatagggaccatccactg

SEQ ID NO: 2631 - DNA, 20 bp, Artificial Sequence
  Description of Artificial Sequence: Synthetic oligonucleotide
gtccgtgtttacactcctgt

SEQ ID NO: 2632 - DNA, 20 bp, Artificial Sequence
  Description of Artificial Sequence: Synthetic oligonucleotide
gaaagtttagaaaatgctag

SEQ ID NO: 2633 - DNA, 20 bp, Artificial Sequence
  Description of Artificial Sequence: Synthetic oligonucleotide
gcaaaggctgtagttgatgg

SEQ ID NO: 2634 - DNA, 20 bp, Artificial Sequence
  Description of Artificial Sequence: Synthetic oligonucleotide
ccagatggcacttacacccg

SEQ ID NO: 2635 - DNA, 20 bp, Artificial Sequence
  Description of Artificial Sequence: Synthetic oligonucleotide
agtgtgagagtccccaatgg

SEQ ID NO: 2636 - DNA, 20 bp, Artificial Sequence
  Description of Artificial Sequence: Synthetic oligonucleotide
gtccacatatgcaacacctg

SEQ ID NO: 2637 - DNA, 20 bp, Artificial Sequence
  Description of Artificial Sequence: Synthetic oligonucleotide
gtctacatgctcaaacacca

SEQ ID NO: 2638 - DNA, 20 bp, Artificial Sequence
  Description of Artificial Sequence: Synthetic oligonucleotide
acggggaccttgcgtacgag

SEQ ID NO: 2639 - DNA, 20 bp, Artificial Sequence
  Description of Artificial Sequence: Synthetic oligonucleotide
tggatactacattaccaccc

SEQ ID NO: 2640 - DNA, 20 bp, Artificial Sequence
  Description of Artificial Sequence: Synthetic oligonucleotide
gtcccccgaatcattccttg

SEQ ID NO: 2641 - DNA, 20 bp, Artificial Sequence
  Description of Artificial Sequence: Synthetic oligonucleotide
ttgtcctttggaaacccaag

SEQ ID NO: 2642 - DNA, 20 bp, Artificial Sequence
  Description of Artificial Sequence: Synthetic oligonucleotide
ctcttagcccccattcactg

SEQ ID NO: 2643 - DNA, 20 bp, Artificial Sequence
  Description of Artificial Sequence: Synthetic oligonucleotide
aatgaaagcatggaccatgg

SEQ ID NO: 2644 - DNA, 20 bp, Artificial Sequence
  Description of Artificial Sequence: Synthetic oligonucleotide
cttcgggtacttggtaaagg

SEQ ID NO: 2645 - DNA, 20 bp, Artificial Sequence
  Description of Artificial Sequence: Synthetic oligonucleotide
agcagaacggaatattctgg

SEQ ID NO: 2646 - DNA, 20 bp, Artificial Sequence
  Description of Artificial Sequence: Synthetic oligonucleotide
tgtcagtggacaaacacgga

SEQ ID NO: 2647 - DNA, 20 bp, Artificial Sequence
  Description of Artificial Sequence: Synthetic oligonucleotide
aaatcccagtacctgcaact

SEQ ID NO: 2648 - DNA, 20 bp, Artificial Sequence
  Description of Artificial Sequence: Synthetic oligonucleotide
ggtaccgtgactgcaagcgg

SEQ ID NO: 2649 - DNA, 20 bp, Artificial Sequence
  Description of Artificial Sequence: Synthetic oligonucleotide
gcggccaacctgacgcacct

SEQ ID NO: 2650 - DNA, 20 bp, Artificial Sequence
  Description of Artificial Sequence: Synthetic oligonucleotide
tctgatgataaatgactgcg

SEQ ID NO: 2651 - DNA, 20 bp, Artificial Sequence
  Description of Artificial Sequence: Synthetic oligonucleotide
atgtgggagatactgatgca

SEQ ID NO: 2652 - DNA, 20 bp, Artificial Sequence
  Description of Artificial Sequence: Synthetic oligonucleotide
acttaaagctcagctcaggt

SEQ ID NO: 2653 - DNA, 20 bp, Artificial Sequence
  Description of Artificial Sequence: Synthetic oligonucleotide
agagcaaaagatttgtacac

SEQ ID NO: 2654 - DNA, 20 bp, Artificial Sequence
  Description of Artificial Sequence: Synthetic oligonucleotide
tcacaaacccgtcgtccatg

SEQ ID NO: 2655 - DNA, 20 bp, Artificial Sequence
  Description of Artificial Sequence: Synthetic oligonucleotide
atgcagccaattatacagtg

SEQ ID NO: 2656 - DNA, 20 bp, Artificial Sequence
  Description of Artificial Sequence: Synthetic oligonucleotide
ataggcgagtattagtggaa

SEQ ID NO: 2657 - DNA, 20 bp, Artificial Sequence
  Description of Artificial Sequence: Synthetic oligonucleotide
tgtggaccaacttctgaaag

SEQ ID NO: 2658 - DNA, 20 bp, Artificial Sequence
  Description of Artificial Sequence: Synthetic oligonucleotide
gtgtagctctcagagcactc

SEQ ID NO: 2659 - DNA, 20 bp, Artificial Sequence
  Description of Artificial Sequence: Synthetic oligonucleotide
cttcaaagcacttctgcagt

SEQ ID NO: 2660 - DNA, 20 bp, Artificial Sequence
  Description of Artificial Sequence: Synthetic oligonucleotide
agagtccacccagcataggg

SEQ ID NO: 2661 - DNA, 20 bp, Artificial Sequence
  Description of Artificial Sequence: Synthetic oligonucleotide
aagcaaggcttgtagatgcg

SEQ ID NO: 2662 - DNA, 20 bp, Artificial Sequence
  Description of Artificial Sequence: Synthetic oligonucleotide
ccatgaatgatacaaccgtg

SEQ ID NO: 2663 - DNA, 20 bp, Artificial Sequence
  Description of Artificial Sequence: Synthetic oligonucleotide
tgtccagactacataaccgg

SEQ ID NO: 2664 - DNA, 20 bp, Artificial Sequence
  Description of Artificial Sequence: Synthetic oligonucleotide
aagacagaaaaccctacctg

SEQ ID NO: 2665 - DNA, 20 bp, Artificial Sequence
  Description of Artificial Sequence: Synthetic oligonucleotide
aatggactgacattagatgc

SEQ ID NO: 2666 - DNA, 20 bp, Artificial Sequence
  Description of Artificial Sequence: Synthetic oligonucleotide
ccataccttaaatacgtagg

SEQ ID NO: 2667 - DNA, 20 bp, Artificial Sequence
  Description of Artificial Sequence: Synthetic oligonucleotide
ctgtagcactttcagaagcg

SEQ ID NO: 2668 - DNA, 20 bp, Artificial Sequence
  Description of Artificial Sequence: Synthetic oligonucleotide
tccagacaacccatttcgag

SEQ ID NO: 2669 - DNA, 20 bp, Artificial Sequence
  Description of Artificial Sequence: Synthetic oligonucleotide
ctctattgcagttagcggag

SEQ ID NO: 2670 - DNA, 20 bp, Artificial Sequence
  Description of Artificial Sequence: Synthetic oligonucleotide
tgacatggactgccttgcat

SEQ ID NO: 2671 - DNA, 20 bp, Artificial Sequence
  Description of Artificial Sequence: Synthetic oligonucleotide
tcttctggtaacccatgacc

SEQ ID NO: 2672 - DNA, 20 bp, Artificial Sequence
  Description of Artificial Sequence: Synthetic oligonucleotide
catctttgccaacgtcagtg

SEQ ID NO: 2673 - DNA, 20 bp, Artificial Sequence
  Description of Artificial Sequence: Synthetic oligonucleotide
acaccgaggaaatgggctca

SEQ ID NO: 2674 - DNA, 20 bp, Artificial Sequence
  Description of Artificial Sequence: Synthetic oligonucleotide
ggcatagtcgcaaacatctg

SEQ ID NO: 2675 - DNA, 20 bp, Artificial Sequence
  Description of Artificial Sequence: Synthetic oligonucleotide
tctccaaggtgggataacgc

SEQ ID NO: 2676 - DNA, 20 bp, Artificial Sequence
  Description of Artificial Sequence: Synthetic oligonucleotide
gtgccaaataattatccatg

SEQ ID NO: 2677 - DNA, 20 bp, Artificial Sequence
  Description of Artificial Sequence: Synthetic oligonucleotide
tgtataggcaggtagacgtg

SEQ ID NO: 2678 - DNA, 20 bp, Artificial Sequence
  Description of Artificial Sequence: Synthetic oligonucleotide
gagaacattaccggattcga

SEQ ID NO: 2679 - DNA, 20 bp, Artificial Sequence
  Description of Artificial Sequence: Synthetic oligonucleotide
taccatgatctacaggaact

SEQ ID NO: 2680 - DNA, 20 bp, Artificial Sequence
  Description of Artificial Sequence: Synthetic oligonucleotide
agacacttatactatgaaag

SEQ ID NO: 2681 - DNA, 20 bp, Artificial Sequence
  Description of Artificial Sequence: Synthetic oligonucleotide
caacatctgttgcaatgtga

SEQ ID NO: 2682 - DNA, 20 bp, Artificial Sequence
  Description of Artificial Sequence: Synthetic oligonucleotide
ctcacccgcagagaactcgg

SEQ ID NO: 2683 - DNA, 20 bp, Artificial Sequence
  Description of Artificial Sequence: Synthetic oligonucleotide
agtggccaggagtgaaactg

SEQ ID NO: 2684 - DNA, 20 bp, Artificial Sequence
  Description of Artificial Sequence: Synthetic oligonucleotide
gcgccagcggaaggtatgaa

SEQ ID NO: 2685 - DNA, 20 bp, Artificial Sequence
  Description of Artificial Sequence: Synthetic oligonucleotide
tgtggcgccgcacaacgact

SEQ ID NO: 2686 - DNA, 20 bp, Artificial Sequence
  Description of Artificial Sequence: Synthetic oligonucleotide
aggcggtgacaacaggacgc

SEQ ID NO: 2687 - DNA, 20 bp, Artificial Sequence
  Description of Artificial Sequence: Synthetic oligonucleotide
acgtccgcgaacaccaggag

SEQ ID NO: 2688 - DNA, 20 bp, Artificial Sequence
  Description of Artificial Sequence: Synthetic oligonucleotide
gaaggacgcggcgttctgcg

SEQ ID NO: 2689 - DNA, 20 bp, Artificial Sequence
  Description of Artificial Sequence: Synthetic oligonucleotide
gagaatgtagatgttggtga

SEQ ID NO: 2690 - DNA, 20 bp, Artificial Sequence
  Description of Artificial Sequence: Synthetic oligonucleotide
atttgctcctcaacctaacg

SEQ ID NO: 2691 - DNA, 20 bp, Artificial Sequence
  Description of Artificial Sequence: Synthetic oligonucleotide
actttccagaattcaccatg

SEQ ID NO: 2692 - DNA, 20 bp, Artificial Sequence
  Description of Artificial Sequence: Synthetic oligonucleotide
acatctgtcagtgtatacag

SEQ ID NO: 2693 - DNA, 20 bp, Artificial Sequence
  Description of Artificial Sequence: Synthetic oligonucleotide
tttataatacattccatggg

SEQ ID NO: 2694 - DNA, 20 bp, Artificial Sequence
  Description of Artificial Sequence: Synthetic oligonucleotide
tcagacttaatagtccgcgt

SEQ ID NO: 2695 - DNA, 20 bp, Artificial Sequence
  Description of Artificial Sequence: Synthetic oligonucleotide
gaaagaagacaacgacacgc

SEQ ID NO: 2696 - DNA, 20 bp, Artificial Sequence
  Description of Artificial Sequence: Synthetic oligonucleotide
gaatggcatgctccaatgtg

SEQ ID NO: 2697 - DNA, 20 bp, Artificial Sequence
  Description of Artificial Sequence: Synthetic oligonucleotide
tctagtgcattcaagcacaa

SEQ ID NO: 2698 - DNA, 20 bp, Artificial Sequence
  Description of Artificial Sequence: Synthetic oligonucleotide
gctgctgttcttaacccacg

SEQ ID NO: 2699 - DNA, 20 bp, Artificial Sequence
  Description of Artificial Sequence: Synthetic oligonucleotide
cccctttacatggaccggca

SEQ ID NO: 2700 - DNA, 20 bp, Artificial Sequence
  Description of Artificial Sequence: Synthetic oligonucleotide
ccgatgaccaaggaccctgg

SEQ ID NO: 2701 - DNA, 20 bp, Artificial Sequence
  Description of Artificial Sequence: Synthetic oligonucleotide
gtcactgaaggagatgagcg

SEQ ID NO: 2702 - DNA, 20 bp, Artificial Sequence
  Description of Artificial Sequence: Synthetic oligonucleotide
tgcaggtcagtactgtaccg

SEQ ID NO: 2703 - DNA, 20 bp, Artificial Sequence
  Description of Artificial Sequence: Synthetic oligonucleotide
tcctgccagaacacccacgg

SEQ ID NO: 2704 - DNA, 20 bp, Artificial Sequence
  Description of Artificial Sequence: Synthetic oligonucleotide
tcgcacgcctcctcgatcag

SEQ ID NO: 2705 - DNA, 20 bp, Artificial Sequence
  Description of Artificial Sequence: Synthetic oligonucleotide
ttgacgtcgatctcgcatcg

SEQ ID NO: 2706 - DNA, 20 bp, Artificial Sequence
  Description of Artificial Sequence: Synthetic oligonucleotide
ctagtcgcaaagattctcga

SEQ ID NO: 2707 - DNA, 20 bp, Artificial Sequence
  Description of Artificial Sequence: Synthetic oligonucleotide
tccaaaaggcgttacccctg

SEQ ID NO: 2708 - DNA, 20 bp, Artificial Sequence
  Description of Artificial Sequence: Synthetic oligonucleotide
aaattggtgaaacactacac

SEQ ID NO: 2709 - DNA, 20 bp, Artificial Sequence
  Description of Artificial Sequence: Synthetic oligonucleotide
agagagagtgaaacaactaa

SEQ ID NO: 2710 - DNA, 20 bp, Artificial Sequence
  Description of Artificial Sequence: Synthetic oligonucleotide
tgatagcagaaaaaagacgc

SEQ ID NO: 2711 - DNA, 20 bp, Artificial Sequence
  Description of Artificial Sequence: Synthetic oligonucleotide
cagcatgacacgacgcagaa

SEQ ID NO: 2712 - DNA, 20 bp, Artificial Sequence
  Description of Artificial Sequence: Synthetic oligonucleotide
gagggcacatcctcaatacc

SEQ ID NO: 2713 - DNA, 20 bp, Artificial Sequence
  Description of Artificial Sequence: Synthetic oligonucleotide
gcatgaattctccatatacc

SEQ ID NO: 2714 - DNA, 20 bp, Artificial Sequence
  Description of Artificial Sequence: Synthetic oligonucleotide
tggcacaggaacacccatag

SEQ ID NO: 2715 - DNA, 20 bp, Artificial Sequence
  Description of Artificial Sequence: Synthetic oligonucleotide
agaccactctaaatttgacc

SEQ ID NO: 2716 - DNA, 20 bp, Artificial Sequence
  Description of Artificial Sequence: Synthetic oligonucleotide
gcctgaaacagcataccagg

SEQ ID NO: 2717 - DNA, 20 bp, Artificial Sequence
  Description of Artificial Sequence: Synthetic oligonucleotide
tactcggccaggtatatagg

SEQ ID NO: 2718 - DNA, 20 bp, Artificial Sequence
  Description of Artificial Sequence: Synthetic oligonucleotide
gtgtcccttagacgacctcg

SEQ ID NO: 2719 - DNA, 20 bp, Artificial Sequence
  Description of Artificial Sequence: Synthetic oligonucleotide
agctgcttctaaactgacga

SEQ ID NO: 2720 - DNA, 20 bp, Artificial Sequence
  Description of Artificial Sequence: Synthetic oligonucleotide
atccagaacgggcttccccg

SEQ ID NO: 2721 - DNA, 20 bp, Artificial Sequence
  Description of Artificial Sequence: Synthetic oligonucleotide
gatgtggcacagatcatgcc

SEQ ID NO: 2722 - DNA, 20 bp, Artificial Sequence
  Description of Artificial Sequence: Synthetic oligonucleotide
tgccggaggagtggtcgcag

SEQ ID NO: 2723 - DNA, 20 bp, Artificial Sequence
  Description of Artificial Sequence: Synthetic oligonucleotide
ctcggagatccggcacactg

SEQ ID NO: 2724 - DNA, 20 bp, Artificial Sequence
  Description of Artificial Sequence: Synthetic oligonucleotide
tggtcgaagaggcggctatg

SEQ ID NO: 2725 - DNA, 20 bp, Artificial Sequence
  Description of Artificial Sequence: Synthetic oligonucleotide
cactgcggggctctcgatgg

SEQ ID NO: 2726 - DNA, 20 bp, Artificial Sequence
  Description of Artificial Sequence: Synthetic oligonucleotide
tcatcaacagagcccgccaa

SEQ ID NO: 2727 - DNA, 20 bp, Artificial Sequence
  Description of Artificial Sequence: Synthetic oligonucleotide
ccatgaagagagaactaccc

SEQ ID NO: 2728 - DNA, 20 bp, Artificial Sequence
  Description of Artificial Sequence: Synthetic oligonucleotide
ccaggagatgcgtcgccgcg

SEQ ID NO: 2729 - DNA, 20 bp, Artificial Sequence
  Description of Artificial Sequence: Synthetic oligonucleotide
tctacgacgacactgtcctg

SEQ ID NO: 2730 - DNA, 20 bp, Artificial Sequence
  Description of Artificial Sequence: Synthetic oligonucleotide
ggacaacaaagactgcacag

SEQ ID NO: 2731 - DNA, 20 bp, Artificial Sequence
  Description of Artificial Sequence: Synthetic oligonucleotide
acggctatgtgcaatctgcg

SEQ ID NO: 2732 - DNA, 20 bp, Artificial Sequence
  Description of Artificial Sequence: Synthetic oligonucleotide
gccctggctggatcccgcag

SEQ ID NO: 2733 - DNA, 20 bp, Artificial Sequence
  Description of Artificial Sequence: Synthetic oligonucleotide
gtggcttcacatcttcaggg

SEQ ID NO: 2734 - DNA, 20 bp, Artificial Sequence
  Description of Artificial Sequence: Synthetic oligonucleotide
gcacagttactggacaaccg

SEQ ID NO: 2735 - DNA, 20 bp, Artificial Sequence
  Description of Artificial Sequence: Synthetic oligonucleotide
ctcacccctcaagccactag

SEQ ID NO: 2736 - DNA, 20 bp, Artificial Sequence
  Description of Artificial Sequence: Synthetic oligonucleotide
gggcactggtgcgagcacag

SEQ ID NO: 2737 - DNA, 20 bp, Artificial Sequence
  Description of Artificial Sequence: Synthetic oligonucleotide
ccctccggagactacagcca

SEQ ID NO: 2738 - DNA, 20 bp, Artificial Sequence
  Description of Artificial Sequence: Synthetic oligonucleotide
attctagagtatgccccccg

SEQ ID NO: 2739 - DNA, 20 bp, Artificial Sequence
  Description of Artificial Sequence: Synthetic oligonucleotide
tctttccggaggactcgctg

SEQ ID NO: 2740 - DNA, 20 bp, Artificial Sequence
  Description of Artificial Sequence: Synthetic oligonucleotide
catcaacccatactgcaggt

SEQ ID NO: 2741 - DNA, 20 bp, Artificial Sequence
  Description of Artificial Sequence: Synthetic oligonucleotide
tgacgagcagcgaacagcca

SEQ ID NO: 2742 - DNA, 20 bp, Artificial Sequence
  Description of Artificial Sequence: Synthetic oligonucleotide
gaaggtgcgttcgatgacag

SEQ ID NO: 2743 - DNA, 20 bp, Artificial Sequence
  Description of Artificial Sequence: Synthetic oligonucleotide
cctgcactcggagaagaacg

SEQ ID NO: 2744 - DNA, 20 bp, Artificial Sequence
  Description of Artificial Sequence: Synthetic oligonucleotide
tgttgaggggagcctcacgt

SEQ ID NO: 2745 - DNA, 20 bp, Artificial Sequence
  Description of Artificial Sequence: Synthetic oligonucleotide
tgtcatggagtacgccaacg

SEQ ID NO: 2746 - DNA, 20 bp, Artificial Sequence
  Description of Artificial Sequence: Synthetic oligonucleotide
tgaaagacaagtcgtccggg

SEQ ID NO: 2747 - DNA, 20 bp, Artificial Sequence
  Description of Artificial Sequence: Synthetic oligonucleotide
gctcgtgaggctctacgctg

SEQ ID NO: 2748 - DNA, 20 bp, Artificial Sequence
  Description of Artificial Sequence: Synthetic oligonucleotide
ttactataacaacagtacca

SEQ ID NO: 2749 - DNA, 20 bp, Artificial Sequence
  Description of Artificial Sequence: Synthetic oligonucleotide
taataacatcaccatgcaca

SEQ ID NO: 2750 - DNA, 20 bp, Artificial Sequence
  Description of Artificial Sequence: Synthetic oligonucleotide
ggagcccactcggattccag

SEQ ID NO: 2751 - DNA, 20 bp, Artificial Sequence
  Description of Artificial Sequence: Synthetic oligonucleotide
catcgaccgatacctggctg

SEQ ID NO: 2752 - DNA, 20 bp, Artificial Sequence
  Description of Artificial Sequence: Synthetic oligonucleotide
tggtcttcatcttggcatag

SEQ ID NO: 2753 - DNA, 20 bp, Artificial Sequence
  Description of Artificial Sequence: Synthetic oligonucleotide
agcccagcatatatcatgat

SEQ ID NO: 2754 - DNA, 20 bp, Artificial Sequence
  Description of Artificial Sequence: Synthetic oligonucleotide
agtaccgtgtcaccacgtaa

SEQ ID NO: 2755 - DNA, 20 bp, Artificial Sequence
  Description of Artificial Sequence: Synthetic oligonucleotide
ccgggaacaggactttatgg

SEQ ID NO: 2756 - DNA, 20 bp, Artificial Sequence
  Description of Artificial Sequence: Synthetic oligonucleotide
agaaacttcagccaactgtg

SEQ ID NO: 2757 - DNA, 20 bp, Artificial Sequence
  Description of Artificial Sequence: Synthetic oligonucleotide
cttatgtcaggttattcaca

SEQ ID NO: 2758 - DNA, 20 bp, Artificial Sequence
  Description of Artificial Sequence: Synthetic oligonucleotide
ctgagaacattagtgctacg

SEQ ID NO: 2759 - DNA, 20 bp, Artificial Sequence
  Description of Artificial Sequence: Synthetic oligonucleotide
cgaagcccataacgccaagg

SEQ ID NO: 2760 - DNA, 20 bp, Artificial Sequence
  Description of Artificial Sequence: Synthetic oligonucleotide
cctagcagtacataccacca

SEQ ID NO: 2761 - DNA, 20 bp, Artificial Sequence
  Description of Artificial Sequence: Synthetic oligonucleotide
cccgaagccaatgtacctcg

SEQ ID NO: 2762 - DNA, 20 bp, Artificial Sequence
  Description of Artificial Sequence: Synthetic oligonucleotide
atgacaactaaagcaccgca

SEQ ID NO: 2763 - DNA, 20 bp, Artificial Sequence
  Description of Artificial Sequence: Synthetic oligonucleotide
atggatatactcagttaaca

SEQ ID NO: 2764 - DNA, 20 bp, Artificial Sequence
  Description of Artificial Sequence: Synthetic oligonucleotide
tctgaccaggcacgatcaca

SEQ ID NO: 2765 - DNA, 20 bp, Artificial Sequence
  Description of Artificial Sequence: Synthetic oligonucleotide
tatcagacaccatatacccg

SEQ ID NO: 2766 - DNA, 20 bp, Artificial Sequence
  Description of Artificial Sequence: Synthetic oligonucleotide
catcactgcaaacgtcacgt

SEQ ID NO: 2767 - DNA, 20 bp, Artificial Sequence
  Description of Artificial Sequence: Synthetic oligonucleotide
gatgctatccaagaagcacg

SEQ ID NO: 2768 - DNA, 20 bp, Artificial Sequence
  Description of Artificial Sequence: Synthetic oligonucleotide
atacaatcccccagaccacg

SEQ ID NO: 2769 - DNA, 20 bp, Artificial Sequence
  Description of Artificial Sequence: Synthetic oligonucleotide
tgaaggtacacagcaagtgg

SEQ ID NO: 2770 - DNA, 20 bp, Artificial Sequence
  Description of Artificial Sequence: Synthetic oligonucleotide
taggctacatggcttaccag

SEQ ID NO: 2771 - DNA, 20 bp, Artificial Sequence
  Description of Artificial Sequence: Synthetic oligonucleotide
gtgtacactgatattaacag

SEQ ID NO: 2772 - DNA, 20 bp, Artificial Sequence
  Description of Artificial Sequence: Synthetic oligonucleotide
atgattatgaccgatcaggt

SEQ ID NO: 2773 - DNA, 20 bp, Artificial Sequence
  Description of Artificial Sequence: Synthetic oligonucleotide
atcaacgtgtagagcctgag

SEQ ID NO: 2774 - DNA, 20 bp, Artificial Sequence
  Description of Artificial Sequence: Synthetic oligonucleotide
actaccgggacacaggccgt

SEQ ID NO: 2775 - DNA, 20 bp, Artificial Sequence
  Description of Artificial Sequence: Synthetic oligonucleotide
ggagctcttcgacccaccca

SEQ ID NO: 2776 - DNA, 20 bp, Artificial Sequence
  Description of Artificial Sequence: Synthetic oligonucleotide
tgagttgcacgccgtagcgg

SEQ ID NO: 2777 - DNA, 20 bp, Artificial Sequence
  Description of Artificial Sequence: Synthetic oligonucleotide
gcagcagctgaattcatgga

SEQ ID NO: 2778 - DNA, 20 bp, Artificial Sequence
  Description of Artificial Sequence: Synthetic oligonucleotide
ccgcaaccacgtccacgtgt

SEQ ID NO: 2779 - DNA, 20 bp, Artificial Sequence
  Description of Artificial Sequence: Synthetic oligonucleotide
caggattcactccactacga

SEQ ID NO: 2780 - DNA, 20 bp, Artificial Sequence
  Description of Artificial Sequence: Synthetic oligonucleotide
aggaagagcagcaccggcgt

SEQ ID NO: 2781 - DNA, 20 bp, Artificial Sequence
  Description of Artificial Sequence: Synthetic oligonucleotide
gaaatgcaactgtgcgcctg

SEQ ID NO: 2782 - DNA, 20 bp, Artificial Sequence
  Description of Artificial Sequence: Synthetic oligonucleotide
ttgaggataacagtaacaag

SEQ ID NO: 2783 - DNA, 20 bp, Artificial Sequence
  Description of Artificial Sequence: Synthetic oligonucleotide
ctaaatgctaagaagcgcca

SEQ ID NO: 2784 - DNA, 20 bp, Artificial Sequence
  Description of Artificial Sequence: Synthetic oligonucleotide
acagcattcatagacggcag

SEQ ID NO: 2785 - DNA, 20 bp, Artificial Sequence
  Description of Artificial Sequence: Synthetic oligonucleotide
caagcactgcagaatcgagt

SEQ ID NO: 2786 - DNA, 20 bp, Artificial Sequence
  Description of Artificial Sequence: Synthetic oligonucleotide
gccctccagtcacggcactg

SEQ ID NO: 2787 - DNA, 20 bp, Artificial Sequence
  Description of Artificial Sequence: Synthetic oligonucleotide
ctcacctctcacgaacacgt

SEQ ID NO: 2788 - DNA, 20 bp, Artificial Sequence
  Description of Artificial Sequence: Synthetic oligonucleotide
catcgaatccaagccatccg

SEQ ID NO: 2789 - DNA, 20 bp, Artificial Sequence
  Description of Artificial Sequence: Synthetic oligonucleotide
cataccatgcacaatgacct

SEQ ID NO: 2790 - DNA, 20 bp, Artificial Sequence
  Description of Artificial Sequence: Synthetic oligonucleotide
cccgatggactataccgaac

SEQ ID NO: 2791 - DNA, 20 bp, Artificial Sequence
  Description of Artificial Sequence: Synthetic oligonucleotide
tcaattctcactcacgacca

SEQ ID NO: 2792 - DNA, 20 bp, Artificial Sequence
  Description of Artificial Sequence: Synthetic oligonucleotide
gttgatcgaaaatgggagaa

SEQ ID NO: 2793 - DNA, 20 bp, Artificial Sequence
  Description of Artificial Sequence: Synthetic oligonucleotide
cgtcccttcgtctctgctta

SEQ ID NO: 2794 - DNA, 20 bp, Artificial Sequence
  Description of Artificial Sequence: Synthetic oligonucleotide
aatcgactcgaacttcgtgt

SEQ ID NO: 2795 - DNA, 20 bp, Artificial Sequence
  Description of Artificial Sequence: Synthetic oligonucleotide
agctcgccatgtcggttctc

SEQ ID NO: 2796 - DNA, 20 bp, Artificial Sequence
  Description of Artificial Sequence: Synthetic oligonucleotide
cagagacaatgacatgtaga

SEQ ID NO: 2797 - DNA, 20 bp, Artificial Sequence
  Description of Artificial Sequence: Synthetic oligonucleotide
aaccacggcattgagaggtg

SEQ ID NO: 2798 - DNA, 20 bp, Artificial Sequence
  Description of Artificial Sequence: Synthetic oligonucleotide
caaatacaattacttatagc

SEQ ID NO: 2799 - DNA, 20 bp, Artificial Sequence
  Description of Artificial Sequence: Synthetic oligonucleotide
cgactaaccggaaacttttt

SEQ ID NO: 2800 - DNA, 20 bp, Artificial Sequence
  Description of Artificial Sequence: Synthetic oligonucleotide
caaaagtctcgcttggtcct

SEQ ID NO: 2801 - DNA, 20 bp, Artificial Sequence
  Description of Artificial Sequence: Synthetic oligonucleotide
cagtagcgatcgaatgtcaa

SEQ ID NO: 2802 - DNA, 20 bp, Artificial Sequence
  Description of Artificial Sequence: Synthetic oligonucleotide
agtattaggtacctgcccta

SEQ ID NO: 2803 - DNA, 20 bp, Artificial Sequence
  Description of Artificial Sequence: Synthetic oligonucleotide
ctggcttattagctataaag

SEQ ID NO: 2804 - DNA, 20 bp, Artificial Sequence
  Description of Artificial Sequence: Synthetic oligonucleotide
aatatttggctcggctgcgc

SEQ ID NO: 2805 - DNA, 20 bp, Artificial Sequence
  Description of Artificial Sequence: Synthetic oligonucleotide
gctttcaattgcaaaaatac

SEQ ID NO: 2806 - DNA, 20 bp, Artificial Sequence
  Description of Artificial Sequence: Synthetic oligonucleotide
atactctcacaggtacataa

SEQ ID NO: 2807 - DNA, 20 bp, Artificial Sequence
  Description of Artificial Sequence: Synthetic oligonucleotide
gcaaattcagacagctaatt

SEQ ID NO: 2808 - DNA, 20 bp, Artificial Sequence
  Description of Artificial Sequence: Synthetic oligonucleotide
tcgcgcttgggttatacgct

SEQ ID NO: 2809 - DNA, 20 bp, Artificial Sequence
  Description of Artificial Sequence: Synthetic oligonucleotide
cctacgcggtagggaacttt

SEQ ID NO: 2810 - DNA, 20 bp, Artificial Sequence
  Description of Artificial Sequence: Synthetic oligonucleotide
gaccgcaaagtggtccgaag

SEQ ID NO: 2811 - DNA, 20 bp, Artificial Sequence
  Description of Artificial Sequence: Synthetic oligonucleotide
gctgttccgaagttgagaat

SEQ ID NO: 2812 - DNA, 20 bp, Artificial Sequence
  Description of Artificial Sequence: Synthetic oligonucleotide
cgcgtgtagctggagacaag

SEQ ID NO: 2813 - DNA, 20 bp, Artificial Sequence
  Description of Artificial Sequence: Synthetic oligonucleotide
cgcggcccacgcgtcatcgc

SEQ ID NO: 2814 - DNA, 20 bp, Artificial Sequence
  Description of Artificial Sequence: Synthetic oligonucleotide
tcctgccaagaaacaccctt

SEQ ID NO: 2815 - DNA, 20 bp, Artificial Sequence
  Description of Artificial Sequence: Synthetic oligonucleotide
aaattggctttcgttcgtgc

SEQ ID NO: 2816 - DNA, 20 bp, Artificial Sequence
  Description of Artificial Sequence: Synthetic oligonucleotide
taaggcgacctgcgcttgtg

SEQ ID NO: 2817 - DNA, 20 bp, Artificial Sequence
  Description of Artificial Sequence: Synthetic oligonucleotide
tcgcggacatagggctctaa

SEQ ID NO: 2818 - DNA, 20 bp, Artificial Sequence
  Description of Artificial Sequence: Synthetic oligonucleotide
cggtttacatctgcccatcg

SEQ ID NO: 2819 - DNA, 20 bp, Artificial Sequence
  Description of Artificial Sequence: Synthetic oligonucleotide
cgatggatccctagttcctg

SEQ ID NO: 2820 - DNA, 20 bp, Artificial Sequence
  Description of Artificial Sequence: Synthetic oligonucleotide
cgaacttaatcccgtggcaa

SEQ ID NO: 2821 - DNA, 20 bp, Artificial Sequence
  Description of Artificial Sequence: Synthetic oligonucleotide
gttcatttccaagtccgctg

SEQ ID NO: 2822 - DNA, 20 bp, Artificial Sequence
  Description of Artificial Sequence: Synthetic oligonucleotide
gttttcagttgcccaacagc

SEQ ID NO: 2823 - DNA, 20 bp, Artificial Sequence
  Description of Artificial Sequence: Synthetic oligonucleotide
cctgcggtgcacggctagcc

SEQ ID NO: 2824 - DNA, 20 bp, Artificial Sequence
  Description of Artificial Sequence: Synthetic oligonucleotide
gggcgctaagatatatgccc

SEQ ID NO: 2825 - DNA, 20 bp, Artificial Sequence
  Description of Artificial Sequence: Synthetic oligonucleotide
caaacagtctaaggcgacga

SEQ ID NO: 2826 - DNA, 20 bp, Artificial Sequence
  Description of Artificial Sequence: Synthetic oligonucleotide
tgcccacttagcaacactct

SEQ ID NO: 2827 - DNA, 20 bp, Artificial Sequence
  Description of Artificial Sequence: Synthetic oligonucleotide
aacgctgtcgtacgtgtata

SEQ ID NO: 2828 - DNA, 20 bp, Artificial Sequence
  Description of Artificial Sequence: Synthetic oligonucleotide
gccgccgatttcataagtaa

SEQ ID NO: 2829 - DNA, 20 bp, Artificial Sequence
  Description of Artificial Sequence: Synthetic oligonucleotide
acgcatgcttcccaaagcgt

SEQ ID NO: 2830 - DNA, 20 bp, Artificial Sequence
  Description of Artificial Sequence: Synthetic oligonucleotide
aagcactagtccgtatgatg

SEQ ID NO: 2831 - DNA, 20 bp, Artificial Sequence
  Description of Artificial Sequence: Synthetic oligonucleotide
tagtctcacctgatggcgtg

SEQ ID NO: 2832 - DNA, 20 bp, Artificial Sequence
  Description of Artificial Sequence: Synthetic oligonucleotide
agaagaaaaaaatgtctacg

SEQ ID NO: 2833 - DNA, 20 bp, Artificial Sequence
  Description of Artificial Sequence: Synthetic oligonucleotide
tctggcttgacacgaccgtt

SEQ ID NO: 2834 - DNA, 20 bp, Artificial Sequence
  Description of Artificial Sequence: Synthetic oligonucleotide
tctattttgtctgcgcagaa

SEQ ID NO: 2835 - DNA, 20 bp, Artificial Sequence
  Description of Artificial Sequence: Synthetic oligonucleotide
cgagcaaagattgttggata

SEQ ID NO: 2836 - DNA, 20 bp, Artificial Sequence
  Description of Artificial Sequence: Synthetic oligonucleotide
ttcttagaagttgctccacg

SEQ ID NO: 2837 - DNA, 20 bp, Artificial Sequence
  Description of Artificial Sequence: Synthetic oligonucleotide
taatcacattgcttaaccgg

SEQ ID NO: 2838 - DNA, 20 bp, Artificial Sequence
  Description of Artificial Sequence: Synthetic oligonucleotide
ggagagggcccgcgaactca

SEQ ID NO: 2839 - DNA, 20 bp, Artificial Sequence
  Description of Artificial Sequence: Synthetic oligonucleotide
acccatatatgctgccgcac

SEQ ID NO: 2840 - DNA, 20 bp, Artificial Sequence
  Description of Artificial Sequence: Synthetic oligonucleotide
cgggatgcagctggagagga

SEQ ID NO: 2841 - DNA, 20 bp, Artificial Sequence
  Description of Artificial Sequence: Synthetic oligonucleotide
gtcctcatccggtcaggctg

SEQ ID NO: 2842 - DNA, 20 bp, Artificial Sequence
  Description of Artificial Sequence: Synthetic oligonucleotide
aaatacaagctatagcgata

SEQ ID NO: 2843 - DNA, 20 bp, Artificial Sequence
  Description of Artificial Sequence: Synthetic oligonucleotide
gcgatcggagtgccacgata

SEQ ID NO: 2844 - DNA, 20 bp, Artificial Sequence
  Description of Artificial Sequence: Synthetic oligonucleotide
agcgattcacgtattagatg

SEQ ID NO: 2845 - DNA, 20 bp, Artificial Sequence
  Description of Artificial Sequence: Synthetic oligonucleotide
gagtaatttcgaacgtattg

SEQ ID NO: 2846 - DNA, 20 bp, Artificial Sequence
  Description of Artificial Sequence: Synthetic oligonucleotide
ttcttcggcctacacccggt

SEQ ID NO: 2847 - DNA, 20 bp, Artificial Sequence
  Description of Artificial Sequence: Synthetic oligonucleotide
gtacccctatggccgttcta

SEQ ID NO: 2848 - DNA, 20 bp, Artificial Sequence
  Description of Artificial Sequence: Synthetic oligonucleotide
atagcggatgtccttggaaa

SEQ ID NO: 2849 - DNA, 20 bp, Artificial Sequence
  Description of Artificial Sequence: Synthetic oligonucleotide
cgtgtttggaatttgccgcg

SEQ ID NO: 2850 - DNA, 20 bp, Artificial Sequence
  Description of Artificial Sequence: Synthetic oligonucleotide
gccacacgaatcataaagag

SEQ ID NO: 2851 - DNA, 20 bp, Artificial Sequence
  Description of Artificial Sequence: Synthetic oligonucleotide
acttacggcactcgcatgcc

SEQ ID NO: 2852 - DNA, 20 bp, Artificial Sequence
  Description of Artificial Sequence: Synthetic oligonucleotide
gagaccactttcgtgcaagc

SEQ ID NO: 2853 - DNA, 20 bp, Artificial Sequence
  Description of Artificial Sequence: Synthetic oligonucleotide
tgccgctatactaaaacctt

SEQ ID NO: 2854 - DNA, 20 bp, Artificial Sequence
  Description of Artificial Sequence: Synthetic oligonucleotide
atctctatactgtcactcgc

SEQ ID NO: 2855 - DNA, 20 bp, Artificial Sequence
  Description of Artificial Sequence: Synthetic oligonucleotide
tcatcttacatctgggagac

SEQ ID NO: 2856 - DNA, 20 bp, Artificial Sequence
  Description of Artificial Sequence: Synthetic oligonucleotide
tgaacggtgaagagataggg

SEQ ID NO: 2857 - DNA, 20 bp, Artificial Sequence
  Description of Artificial Sequence: Synthetic oligonucleotide
cttcctgcgtggctttaaac

SEQ ID NO: 2858 - DNA, 20 bp, Artificial Sequence
  Description of Artificial Sequence: Synthetic oligonucleotide
aaacgagatcgagaaaggta

SEQ ID NO: 2859 - DNA, 20 bp, Artificial Sequence
  Description of Artificial Sequence: Synthetic oligonucleotide
gagcagctgtcaggtcttgt

SEQ ID NO: 2860 - DNA, 20 bp, Artificial Sequence
  Description of Artificial Sequence: Synthetic oligonucleotide
ggtactggaagtccgaaacc

SEQ ID NO: 2861 - DNA, 20 bp, Artificial Sequence
  Description of Artificial Sequence: Synthetic oligonucleotide
aggccacaaattgtatacag

SEQ ID NO: 2862 - DNA, 20 bp, Artificial Sequence
  Description of Artificial Sequence: Synthetic oligonucleotide
cccttctggcgggccaaaca

SEQ ID NO: 2863 - DNA, 20 bp, Artificial Sequence
  Description of Artificial Sequence: Synthetic oligonucleotide
tcaaccccagcgcaccgttg

SEQ ID NO: 2864 - DNA, 20 bp, Artificial Sequence
  Description of Artificial Sequence: Synthetic oligonucleotide
tcgagaggaaaaacacactg

SEQ ID NO: 2865 - DNA, 20 bp, Artificial Sequence
  Description of Artificial Sequence: Synthetic oligonucleotide
ggcgcattaaagtcgagagc

SEQ ID NO: 2866 - DNA, 20 bp, Artificial Sequence
  Description of Artificial Sequence: Synthetic oligonucleotide
ggagatgcggccttctcaaa

SEQ ID NO: 2867 - DNA, 20 bp, Artificial Sequence
  Description of Artificial Sequence: Synthetic oligonucleotide
ccgctgtctcactaatctca

SEQ ID NO: 2868 - DNA, 20 bp, Artificial Sequence
  Description of Artificial Sequence: Synthetic oligonucleotide
agcattctcaccaagaccga

SEQ ID NO: 2869 - DNA, 20 bp, Artificial Sequence
  Description of Artificial Sequence: Synthetic oligonucleotide
gacttctagaatataaaaga

SEQ ID NO: 2870 - DNA, 20 bp, Artificial Sequence
  Description of Artificial Sequence: Synthetic oligonucleotide
ctggtgaccgacaattacac

SEQ ID NO: 2871 - DNA, 20 bp, Artificial Sequence
  Description of Artificial Sequence: Synthetic oligonucleotide
atagccgccgctcattactt

SEQ ID NO: 2872 - DNA, 20 bp, Artificial Sequence
  Description of Artificial Sequence: Synthetic oligonucleotide
taccctccggatacggactg

SEQ ID NO: 2873 - DNA, 20 bp, Artificial Sequence
  Description of Artificial Sequence: Synthetic oligonucleotide
ctgccccaggcgtaatcctc

SEQ ID NO: 2874 - DNA, 20 bp, Artificial Sequence
  Description of Artificial Sequence: Synthetic oligonucleotide
tacgtaagtgacgacaggaa

SEQ ID NO: 2875 - DNA, 20 bp, Artificial Sequence
  Description of Artificial Sequence: Synthetic oligonucleotide
cagcgccgaaactctttccg

SEQ ID NO: 2876 - DNA, 20 bp, Artificial Sequence
  Description of Artificial Sequence: Synthetic oligonucleotide
cgcttccgcggcccgttcaa

SEQ ID NO: 2877 - DNA, 20 bp, Artificial Sequence
  Description of Artificial Sequence: Synthetic oligonucleotide
taagcctcatgaaggagggg

SEQ ID NO: 2878 - DNA, 20 bp, Artificial Sequence
  Description of Artificial Sequence: Synthetic oligonucleotide
acagcgctctcgtgtactat

SEQ ID NO: 2879 - DNA, 20 bp, Artificial Sequence
  Description of Artificial Sequence: Synthetic oligonucleotide
agtcttaaagaccctaagct

SEQ ID NO: 2880 - DNA, 20 bp, Artificial Sequence
  Description of Artificial Sequence: Synthetic oligonucleotide
cttaagtcatgagcaaagat

SEQ ID NO: 2881 - DNA, 20 bp, Artificial Sequence
  Description of Artificial Sequence: Synthetic oligonucleotide
gttacgtaccctccaacttc

SEQ ID NO: 2882 - DNA, 20 bp, Artificial Sequence
  Description of Artificial Sequence: Synthetic oligonucleotide
ggatattgagtaaacccgat

SEQ ID NO: 2883 - DNA, 20 bp, Artificial Sequence
  Description of Artificial Sequence: Synthetic oligonucleotide
cgacgctaggtaacgtagag

SEQ ID NO: 2884 - DNA, 20 bp, Artificial Sequence
  Description of Artificial Sequence: Synthetic oligonucleotide
gagaaggatggaaattagaa

SEQ ID NO: 2885 - DNA, 20 bp, Artificial Sequence
  Description of Artificial Sequence: Synthetic oligonucleotide
ctccgttatgtggcatgaga

SEQ ID NO: 2886 - DNA, 20 bp, Artificial Sequence
  Description of Artificial Sequence: Synthetic oligonucleotide
gggcctacgatcagaggtgt

SEQ ID NO: 2887 - DNA, 20 bp, Artificial Sequence
  Description of Artificial Sequence: Synthetic oligonucleotide
tctaaagccgtcctgatgtt

SEQ ID NO: 2888 - DNA, 20 bp, Artificial Sequence
  Description of Artificial Sequence: Synthetic oligonucleotide
aaggcgcgcgaatgtggcag

SEQ ID NO: 2889 - DNA, 20 bp, Artificial Sequence
  Description of Artificial Sequence: Synthetic oligonucleotide
gaacgtagaaattcccattt

SEQ ID NO: 2890 - DNA, 20 bp, Artificial Sequence
  Description of Artificial Sequence: Synthetic oligonucleotide
gcccagtgggtcctcgtgac

SEQ ID NO: 2891 - DNA, 20 bp, Artificial Sequence
  Description of Artificial Sequence: Synthetic oligonucleotide
ttgacatcagaaacagacgt

SEQ ID NO: 2892 - DNA, 20 bp, Artificial Sequence
  Description of Artificial Sequence: Synthetic oligonucleotide
tgtcatggtttgactgtccc

SEQ ID NO: 2893 - DNA, 20 bp, Artificial Sequence
  Description of Artificial Sequence: Synthetic oligonucleotide
ggctcgggatccctagcagg

SEQ ID NO: 2894 - DNA, 20 bp, Artificial Sequence
  Description of Artificial Sequence: Synthetic oligonucleotide
gtgttggataagtaatgggg

SEQ ID NO: 2895 - DNA, 20 bp, Artificial Sequence
  Description of Artificial Sequence: Synthetic oligonucleotide
ggatatttgagctcatctct

SEQ ID NO: 2896 - DNA, 20 bp, Artificial Sequence
  Description of Artificial Sequence: Synthetic oligonucleotide
gatacattataaggagcatt

SEQ ID NO: 2897 - DNA, 20 bp, Artificial Sequence
  Description of Artificial Sequence: Synthetic oligonucleotide
ataattagttttgagaatag

SEQ ID NO: 2898 - DNA, 20 bp, Artificial Sequence
  Description of Artificial Sequence: Synthetic oligonucleotide
tgagggacattcatccggcc

SEQ ID NO: 2899 - DNA, 20 bp, Artificial Sequence
  Description of Artificial Sequence: Synthetic oligonucleotide
gagaaccaaggatggcttat

SEQ ID NO: 2900 - DNA, 20 bp, Artificial Sequence
  Description of Artificial Sequence: Synthetic oligonucleotide
tgcactatttcatggtgata

SEQ ID NO: 2901 - DNA, 20 bp, Artificial Sequence
  Description of Artificial Sequence: Synthetic oligonucleotide
cgttttaaacttgcaaggta

SEQ ID NO: 2902 - DNA, 20 bp, Artificial Sequence
  Description of Artificial Sequence: Synthetic oligonucleotide
accggcttcaactccttcag

SEQ ID NO: 2903 - DNA, 20 bp, Artificial Sequence
  Description of Artificial Sequence: Synthetic oligonucleotide
catagaccaatcagcacttt

SEQ ID NO: 2904 - DNA, 20 bp, Artificial Sequence
  Description of Artificial Sequence: Synthetic oligonucleotide
cttgggcatttatgtctcca

SEQ ID NO: 2905 - DNA, 20 bp, Artificial Sequence
  Description of Artificial Sequence: Synthetic oligonucleotide
aataatatttccctgcactc

SEQ ID NO: 2906 - DNA, 20 bp, Artificial Sequence
  Description of Artificial Sequence: Synthetic oligonucleotide
ctggaaaagtttagcaatca

SEQ ID NO: 2907 - DNA, 20 bp, Artificial Sequence
  Description of Artificial Sequence: Synthetic oligonucleotide
ttagtcacagtcccctacct

SEQ ID NO: 2908 - DNA, 20 bp, Artificial Sequence
  Description of Artificial Sequence: Synthetic oligonucleotide
acttataccacatggtaacc

SEQ ID NO: 2909 - DNA, 20 bp, Artificial Sequence
  Description of Artificial Sequence: Synthetic oligonucleotide
ctgctatggggggagttatt

SEQ ID NO: 2910 - DNA, 20 bp, Artificial Sequence
  Description of Artificial Sequence: Synthetic oligonucleotide
aagtcaacatgtctaactca

SEQ ID NO: 2911 - DNA, 20 bp, Artificial Sequence
  Description of Artificial Sequence: Synthetic oligonucleotide
cctagctcacttaagtttgc

SEQ ID NO: 2912 - DNA, 20 bp, Artificial Sequence
  Description of Artificial Sequence: Synthetic oligonucleotide
gggaggtattattggattct

SEQ ID NO: 2913 - DNA, 20 bp, Artificial Sequence
  Description of Artificial Sequence: Synthetic oligonucleotide
tttatcaatttactgaagta

SEQ ID NO: 2914 - DNA, 20 bp, Artificial Sequence
  Description of Artificial Sequence: Synthetic oligonucleotide
cttaccctataggggatatt

SEQ ID NO: 2915 - DNA, 20 bp, Artificial Sequence
  Description of Artificial Sequence: Synthetic oligonucleotide
catgagccccaagggatctt

SEQ ID NO: 2916 - DNA, 20 bp, Artificial Sequence
  Description of Artificial Sequence: Synthetic oligonucleotide
aggcctgagactcacatttc

SEQ ID NO: 2917 - DNA, 20 bp, Artificial Sequence
  Description of Artificial Sequence: Synthetic oligonucleotide
tcaatctcagcccaggacct

SEQ ID NO: 2918 - DNA, 20 bp, Artificial Sequence
  Description of Artificial Sequence: Synthetic oligonucleotide
agatacgttttagacctcaa

SEQ ID NO: 2919 - DNA, 20 bp, Artificial Sequence
  Description of Artificial Sequence: Synthetic oligonucleotide
tagagcctcaaccatgtttt

SEQ ID NO: 2920 - DNA, 20 bp, Artificial Sequence
  Description of Artificial Sequence: Synthetic oligonucleotide
ccaggggacctgaacgcgtg

SEQ ID NO: 2921 - DNA, 20 bp, Artificial Sequence
  Description of Artificial Sequence: Synthetic oligonucleotide
acacagagacatctcctgtc

SEQ ID NO: 2922 - DNA, 20 bp, Artificial Sequence
  Description of Artificial Sequence: Synthetic oligonucleotide
ggtaagaatgaatagttccc

SEQ ID NO: 2923 - DNA, 20 bp, Artificial Sequence
  Description of Artificial Sequence: Synthetic oligonucleotide
tgtcctcattccaattcttg

SEQ ID NO: 2924 - DNA, 20 bp, Artificial Sequence
  Description of Artificial Sequence: Synthetic oligonucleotide
atacgacttagcagccttgt

SEQ ID NO: 2925 - DNA, 20 bp, Artificial Sequence
  Description of Artificial Sequence: Synthetic oligonucleotide
aaggccaatgattgaagtca

SEQ ID NO: 2926 - DNA, 20 bp, Artificial Sequence
  Description of Artificial Sequence: Synthetic oligonucleotide
agcactttaactagacaata

SEQ ID NO: 2927 - DNA, 20 bp, Artificial Sequence
  Description of Artificial Sequence: Synthetic oligonucleotide
agcaacaccagcatcatggc

SEQ ID NO: 2928 - DNA, 20 bp, Artificial Sequence
  Description of Artificial Sequence: Synthetic oligonucleotide
taattaaacacttgcaacat

SEQ ID NO: 2929 - DNA, 20 bp, Artificial Sequence
  Description of Artificial Sequence: Synthetic oligonucleotide
gaagcacacgtggtgtattt

SEQ ID NO: 2930 - DNA, 20 bp, Artificial Sequence
  Description of Artificial Sequence: Synthetic oligonucleotide
ggagcttgaagttctaaatg

SEQ ID NO: 2931 - DNA, 20 bp, Artificial Sequence
  Description of Artificial Sequence: Synthetic oligonucleotide
aatcagcattaacagaaagg

SEQ ID NO: 2932 - DNA, 20 bp, Artificial Sequence
  Description of Artificial Sequence: Synthetic oligonucleotide
catgcttaagagtttcctat

SEQ ID NO: 2933 - DNA, 20 bp, Artificial Sequence
  Description of Artificial Sequence: Synthetic oligonucleotide
atcataccccatgagacttt

SEQ ID NO: 2934 - DNA, 20 bp, Artificial Sequence
  Description of Artificial Sequence: Synthetic oligonucleotide
atactcacatcatgttaaga

SEQ ID NO: 2935 - DNA, 20 bp, Artificial Sequence
  Description of Artificial Sequence: Synthetic oligonucleotide
cgcccatgttggccataaac

SEQ ID NO: 2936 - DNA, 20 bp, Artificial Sequence
  Description of Artificial Sequence: Synthetic oligonucleotide
atcagtctgtcttgtaggca

SEQ ID NO: 2937 - DNA, 20 bp, Artificial Sequence
  Description of Artificial Sequence: Synthetic oligonucleotide
ttgctgggctgacccaagct

SEQ ID NO: 2938 - DNA, 20 bp, Artificial Sequence
  Description of Artificial Sequence: Synthetic oligonucleotide
gtttaggtaaaaataccttg

SEQ ID NO: 2939 - DNA, 20 bp, Artificial Sequence
  Description of Artificial Sequence: Synthetic oligonucleotide
ttctaccccaccacatccca

SEQ ID NO: 2940 - DNA, 20 bp, Artificial Sequence
  Description of Artificial Sequence: Synthetic oligonucleotide
tcgtggaaacatacaagtct

SEQ ID NO: 2941 - DNA, 20 bp, Artificial Sequence
  Description of Artificial Sequence: Synthetic oligonucleotide
tcatggtcggatgagttggg

SEQ ID NO: 2942 - DNA, 20 bp, Artificial Sequence
  Description of Artificial Sequence: Synthetic oligonucleotide
aagcatttgcatccagacaa

SEQ ID NO: 2943 - DNA, 20 bp, Artificial Sequence
  Description of Artificial Sequence: Synthetic oligonucleotide
cctgcttcagccactaagca

SEQ ID NO: 2944 - DNA, 20 bp, Artificial Sequence
  Description of Artificial Sequence: Synthetic oligonucleotide
tggtctagcgtgtctcgctc

SEQ ID NO: 2945 - DNA, 20 bp, Artificial Sequence
  Description of Artificial Sequence: Synthetic oligonucleotide
ccagccaaactacaccccag

SEQ ID NO: 2946 - DNA, 20 bp, Artificial Sequence
  Description of Artificial Sequence: Synthetic oligonucleotide
caacgactgcattagggcaa

SEQ ID NO: 2947 - DNA, 20 bp, Artificial Sequence
  Description of Artificial Sequence: Synthetic oligonucleotide
ttccctgggatagctgatat

SEQ ID NO: 2948 - DNA, 20 bp, Artificial Sequence
  Description of Artificial Sequence: Synthetic oligonucleotide
tgttgtgtgcataccctagt

SEQ ID NO: 2949 - DNA, 20 bp, Artificial Sequence
  Description of Artificial Sequence: Synthetic oligonucleotide
gatgaatatgaatgtatgac

SEQ ID NO: 2950 - DNA, 20 bp, Artificial Sequence
  Description of Artificial Sequence: Synthetic oligonucleotide
taagtgcatttctatgtcct

SEQ ID NO: 2951 - DNA, 20 bp, Artificial Sequence
  Description of Artificial Sequence: Synthetic oligonucleotide
gattatctatcctggttccc

SEQ ID NO: 2952 - DNA, 20 bp, Artificial Sequence
  Description of Artificial Sequence: Synthetic oligonucleotide
aataaatagcatgacttatg

SEQ ID NO: 2953 - DNA, 20 bp, Artificial Sequence
  Description of Artificial Sequence: Synthetic oligonucleotide
tttgcaatccccgaggtgac

SEQ ID NO: 2954 - DNA, 20 bp, Artificial Sequence
  Description of Artificial Sequence: Synthetic oligonucleotide
gctgccacaaaggttgtcaa

SEQ ID NO: 2955 - DNA, 20 bp, Artificial Sequence
  Description of Artificial Sequence: Synthetic oligonucleotide
gcaataattaggaccaccca

SEQ ID NO: 2956 - DNA, 20 bp, Artificial Sequence
  Description of Artificial Sequence: Synthetic oligonucleotide
agatgactggagtgctacaa

SEQ ID NO: 2957 - DNA, 20 bp, Artificial Sequence
  Description of Artificial Sequence: Synthetic oligonucleotide
ctcattgacccacataaaat

SEQ ID NO: 2958 - DNA, 20 bp, Artificial Sequence
  Description of Artificial Sequence: Synthetic oligonucleotide
aactcttctgtcgatgagca

SEQ ID NO: 2959 - DNA, 20 bp, Artificial Sequence
  Description of Artificial Sequence: Synthetic oligonucleotide
gggtaaacagtcatgctgca

SEQ ID NO: 2960 - DNA, 20 bp, Artificial Sequence
  Description of Artificial Sequence: Synthetic oligonucleotide
aaactgtgcgacggtaagcg

SEQ ID NO: 2961 - DNA, 20 bp, Artificial Sequence
  Description of Artificial Sequence: Synthetic oligonucleotide
aaagattcacctcgctacgg

SEQ ID NO: 2962 - DNA, 20 bp, Artificial Sequence
  Description of Artificial Sequence: Synthetic oligonucleotide
aacatgtcatcgtttacgcc

SEQ ID NO: 2963 - DNA, 20 bp, Artificial Sequence
  Description of Artificial Sequence: Synthetic oligonucleotide
aaccgatttcaatcgcgtgg

SEQ ID NO: 2964 - DNA, 20 bp, Artificial Sequence
  Description of Artificial Sequence: Synthetic oligonucleotide
aacgaaagctcgttaactcg

SEQ ID NO: 2965 - DNA, 20 bp, Artificial Sequence
  Description of Artificial Sequence: Synthetic oligonucleotide
aacgatgcgggcgacgtgct

SEQ ID NO: 2966 - DNA, 20 bp, Artificial Sequence
  Description of Artificial Sequence: Synthetic oligonucleotide
aactcccccgactccgttcg

SEQ ID NO: 2967 - DNA, 20 bp, Artificial Sequence
  Description of Artificial Sequence: Synthetic oligonucleotide
aagcgatggtccgtatacta

SEQ ID NO: 2968 - DNA, 20 bp, Artificial Sequence
  Description of Artificial Sequence: Synthetic oligonucleotide
aatatttggctcggctgcgc

SEQ ID NO: 2969 - DNA, 20 bp, Artificial Sequence
  Description of Artificial Sequence: Synthetic oligonucleotide
aatccggagtaatccgaccc

SEQ ID NO: 2970 - DNA, 20 bp, Artificial Sequence
  Description of Artificial Sequence: Synthetic oligonucleotide
aatcgactcgaacttcgtgt

SEQ ID NO: 2971 - DNA, 20 bp, Artificial Sequence
  Description of Artificial Sequence: Synthetic oligonucleotide
acaccatatcggcgggacgc

SEQ ID NO: 2972 - DNA, 20 bp, Artificial Sequence
  Description of Artificial Sequence: Synthetic oligonucleotide
ggccgagatgtctcgctccg

SEQ ID NO: 2973 - DNA, 20 bp, Artificial Sequence
  Description of Artificial Sequence: Synthetic oligonucleotide
ggccgagatgtctcgctccg

SEQ ID NO: 2974 - DNA, 20 bp, Artificial Sequence
  Description of Artificial Sequence: Synthetic oligonucleotide
ggccacggagcgagacatct

SEQ ID NO: 2975 - DNA, 20 bp, Artificial Sequence
  Description of Artificial Sequence: Synthetic oligonucleotide
ggccacggagcgagacatct

SEQ ID NO: 2976 - DNA, 20 bp, Artificial Sequence
  Description of Artificial Sequence: Synthetic oligonucleotide
ggccgagatgtctcgctccg

SEQ ID NO: 2977 - DNA, 20 bp, Artificial Sequence
  Description of Artificial Sequence: Synthetic oligonucleotide
ggccgagatgtctcgctccg

SEQ ID NO: 2978 - DNA, 20 bp, Artificial Sequence
  Description of Artificial Sequence: Synthetic oligonucleotide
ggccacggagcgagacatct

SEQ ID NO: 2979 - DNA, 20 bp, Artificial Sequence
  Description of Artificial Sequence: Synthetic oligonucleotide
ggccacggagcgagacatct

SEQ ID NO: 2980 - DNA, 20 bp, Artificial Sequence
  Description of Artificial Sequence: Synthetic oligonucleotide
agttcttgaatgtagagatg

SEQ ID NO: 2981 - DNA, 20 bp, Artificial Sequence
  Description of Artificial Sequence: Synthetic oligonucleotide
gggcagtctcacccgctccg

SEQ ID NO: 2982 - DNA, 20 bp, Artificial Sequence
  Description of Artificial Sequence: Synthetic oligonucleotide
tcttgaatgtagagatgcgg

SEQ ID NO: 2983 - DNA, 20 bp, Artificial Sequence
  Description of Artificial Sequence: Synthetic oligonucleotide
caagtctggctcgttctcag

SEQ ID NO: 2984 - DNA, 20 bp, Artificial Sequence
  Description of Artificial Sequence: Synthetic oligonucleotide
gggccaggctctgttcaacg

SEQ ID NO: 2985 - DNA, 20 bp, Artificial Sequence
  Description of Artificial Sequence: Synthetic oligonucleotide
atacccaatagagtccgagg

SEQ ID NO: 2986 - DNA, 20 bp, Artificial Sequence
  Description of Artificial Sequence: Synthetic oligonucleotide
gcccaacaaacagaggacag

SEQ ID NO: 2987 - DNA, 20 bp, Artificial Sequence
  Description of Artificial Sequence: Synthetic oligonucleotide
tcataattaacacacatcag

SEQ ID NO: 2988 - DNA, 20 bp, Artificial Sequence
  Description of Artificial Sequence: Synthetic oligonucleotide
aaggcccgtgatccccacag

SEQ ID NO: 2989 - DNA, 20 bp, Artificial Sequence
  Description of Artificial Sequence: Synthetic oligonucleotide
gtctacatgctcaaacacca

SEQ ID NO: 2990 - DNA, 20 bp, Artificial Sequence
  Description of Artificial Sequence: Synthetic oligonucleotide
ccagtggctgaaattggtgt

SEQ ID NO: 2991 - DNA, 20 bp, Artificial Sequence
  Description of Artificial Sequence: Synthetic oligonucleotide
agccactggctcatatcgag

SEQ ID NO: 2992 - DNA, 20 bp, Artificial Sequence
  Description of Artificial Sequence: Synthetic oligonucleotide
gcccgcgacttgaagaacgg

SEQ ID NO: 2993 - DNA, 20 bp, Artificial Sequence
  Description of Artificial Sequence: Synthetic oligonucleotide
ccagcagtacgaatgcgtgg

SEQ ID NO: 2994 - DNA, 20 bp, Artificial Sequence
  Description of Artificial Sequence: Synthetic oligonucleotide
gaccttcgagcaccccaacg

SEQ ID NO: 2995 - DNA, 20 bp, Artificial Sequence
  Description of Artificial Sequence: Synthetic oligonucleotide
aatgaagaaagtccagacct

SEQ ID NO: 2996 - DNA, 20 bp, Artificial Sequence
  Description of Artificial Sequence: Synthetic oligonucleotide
cactgtcctggggacccggg

SEQ ID NO: 2997 - DNA, 20 bp, Artificial Sequence
  Description of Artificial Sequence: Synthetic oligonucleotide
aatgggccctagttcctgga

SEQ ID NO: 2998 - DNA, 20 bp, Artificial Sequence
  Description of Artificial Sequence: Synthetic oligonucleotide
caaagggcagcactgtcctg

SEQ ID NO: 2999 - DNA, 20 bp, Artificial Sequence
  Description of Artificial Sequence: Synthetic oligonucleotide
ccccacaggtacgacttggg

SEQ ID NO: 3000 - DNA, 20 bp, Artificial Sequence
  Description of Artificial Sequence: Synthetic oligonucleotide
catcgggaggaacctctgca

SEQ ID NO: 3001 - DNA, 20 bp, Artificial Sequence
  Description of Artificial Sequence: Synthetic oligonucleotide
aaacggcagcaccgtcctag

SEQ ID NO: 3002 - DNA, 20 bp, Artificial Sequence
  Description of Artificial Sequence: Synthetic oligonucleotide
ccccacaggtacaacttggg

SEQ ID NO: 3003 - DNA, 20 bp, Artificial Sequence
  Description of Artificial Sequence: Synthetic oligonucleotide
caacttgggaggaccacgca

SEQ ID NO: 3004 - DNA, 20 bp, Artificial Sequence
  Description of Artificial Sequence: Synthetic oligonucleotide
gagaacctagaaatcatacg

SEQ ID NO: 3005 - DNA, 20 bp, Artificial Sequence
  Description of Artificial Sequence: Synthetic oligonucleotide
tgtcaccacataattacctg

SEQ ID NO: 3006 - DNA, 20 bp, Artificial Sequence
  Description of Artificial Sequence: Synthetic oligonucleotide
ccagatggatgtgaaccccg

SEQ ID NO: 3007 - DNA, 20 bp, Artificial Sequence
  Description of Artificial Sequence: Synthetic oligonucleotide
atggacttccagaaccacct

SEQ ID NO: 3008 - DNA, 20 bp, Artificial Sequence
  Description of Artificial Sequence: Synthetic oligonucleotide
agatacatccacttccacag

SEQ ID NO: 3009 - DNA, 20 bp, Artificial Sequence
  Description of Artificial Sequence: Synthetic oligonucleotide
gagacaggaaatgttccctg

SEQ ID NO: 3010 - DNA, 20 bp, Artificial Sequence
  Description of Artificial Sequence: Synthetic oligonucleotide
agaacaatgattcatcagtg

SEQ ID NO: 3011 - DNA, 20 bp, Artificial Sequence
  Description of Artificial Sequence: Synthetic oligonucleotide
aaagctgttcatgtgaacca

SEQ ID NO: 3012 - DNA, 20 bp, Artificial Sequence
  Description of Artificial Sequence: Synthetic oligonucleotide
ttatcctggagactacacca

SEQ ID NO: 3013 - DNA, 20 bp, Artificial Sequence
  Description of Artificial Sequence: Synthetic oligonucleotide
agaattgagcaagggcagtg

SEQ ID NO: 3014 - DNA, 20 bp, Artificial Sequence
  Description of Artificial Sequence: Synthetic oligonucleotide
tatcctggagactacaccaa

SEQ ID NO: 3015 - DNA, 20 bp, Artificial Sequence
  Description of Artificial Sequence: Synthetic oligonucleotide
gtcttcgggaagtacctgag

SEQ ID NO: 3016 - DNA, 20 bp, Artificial Sequence
  Description of Artificial Sequence: Synthetic oligonucleotide
acaaagaggagagatacctg

SEQ ID NO: 3017 - DNA, 20 bp, Artificial Sequence
  Description of Artificial Sequence: Synthetic oligonucleotide
gaggagctccaagaagactg

SEQ ID NO: 3018 - DNA, 20 bp, Artificial Sequence
  Description of Artificial Sequence: Synthetic oligonucleotide
caaaggacaaggcctcctcg

SEQ ID NO: 3019 - DNA, 20 bp, Artificial Sequence
  Description of Artificial Sequence: Synthetic oligonucleotide
gaagactgaggtgaacctgg

SEQ ID NO: 3020 - DNA, 20 bp, Artificial Sequence
  Description of Artificial Sequence: Synthetic oligonucleotide
agagttatagatggccagtg

SEQ ID NO: 3021 - DNA, 20 bp, Artificial Sequence
  Description of Artificial Sequence: Synthetic oligonucleotide
ctgccactgcaataccaacg

SEQ ID NO: 3022 - DNA, 20 bp, Artificial Sequence
  Description of Artificial Sequence: Synthetic oligonucleotide
caacctcaccaacattacag

SEQ ID NO: 3023 - DNA, 20 bp, Artificial Sequence
  Description of Artificial Sequence: Synthetic oligonucleotide
aatgaagagtacaacctcag

SEQ ID NO: 3024 - DNA, 20 bp, Artificial Sequence
  Description of Artificial Sequence: Synthetic oligonucleotide
tcttgtgtaggagtatacgg

SEQ ID NO: 3025 - DNA, 20 bp, Artificial Sequence
  Description of Artificial Sequence: Synthetic oligonucleotide
gaaggggaagaacatccagg

SEQ ID NO: 3026 - DNA, 20 bp, Artificial Sequence
  Description of Artificial Sequence: Synthetic oligonucleotide
gccctccaagagaatcctgg

SEQ ID NO: 3027 - DNA, 20 bp, Artificial Sequence
  Description of Artificial Sequence: Synthetic oligonucleotide
ttcgtctgcgaagaagaaag

SEQ ID NO: 3028 - DNA, 20 bp, Artificial Sequence
  Description of Artificial Sequence: Synthetic oligonucleotide
ctgggtctgtgagaggacag

SEQ ID NO: 3029 - DNA, 20 bp, Artificial Sequence
  Description of Artificial Sequence: Synthetic oligonucleotide
gcctaatctcgtcgcccacg

SEQ ID NO: 3030 - DNA, 20 bp, Artificial Sequence
  Description of Artificial Sequence: Synthetic oligonucleotide
tcaaccatctgtgagtccag

SEQ ID NO: 3031 - DNA, 20 bp, Artificial Sequence
  Description of Artificial Sequence: Synthetic oligonucleotide
accactagctttccaaacgg

SEQ ID NO: 3032 - DNA, 20 bp, Artificial Sequence
  Description of Artificial Sequence: Synthetic oligonucleotide
aagcacaagatcatgcacag

SEQ ID NO: 3033 - DNA, 20 bp, Artificial Sequence
  Description of Artificial Sequence: Synthetic oligonucleotide
gcagcagcgaaagcgccttg

SEQ ID NO: 3034 - DNA, 20 bp, Artificial Sequence
  Description of Artificial Sequence: Synthetic oligonucleotide
gagttgactaggatgttgga

SEQ ID NO: 3035 - DNA, 20 bp, Artificial Sequence
  Description of Artificial Sequence: Synthetic oligonucleotide
cttacccagaagcagaaggt

SEQ ID NO: 3036 - DNA, 20 bp, Artificial Sequence
  Description of Artificial Sequence: Synthetic oligonucleotide
aagcaccagatcatgcaccg

SEQ ID NO: 3037 - DNA, 20 bp, Artificial Sequence
  Description of Artificial Sequence: Synthetic oligonucleotide
cctggggaaagtcagcatcg

SEQ ID NO: 3038 - DNA, 20 bp, Artificial Sequence
  Description of Artificial Sequence: Synthetic oligonucleotide
aggtgctgaaagaggccaag

SEQ ID NO: 3039 - DNA, 20 bp, Artificial Sequence
  Description of Artificial Sequence: Synthetic oligonucleotide
ggattcccgaggagatcctg

SEQ ID NO: 3040 - DNA, 20 bp, Artificial Sequence
  Description of Artificial Sequence: Synthetic oligonucleotide
ttccgaagctggaatctgtg

SEQ ID NO: 3041 - DNA, 20 bp, Artificial Sequence
  Description of Artificial Sequence: Synthetic oligonucleotide
cgaagctggaatctgtgagg

SEQ ID NO: 3042 - DNA, 20 bp, Artificial Sequence
  Description of Artificial Sequence: Synthetic oligonucleotide
acaggtgtcaccttgaaggt

SEQ ID NO: 3043 - DNA, 20 bp, Artificial Sequence
  Description of Artificial Sequence: Synthetic oligonucleotide
gtggttacagcaccatcagt

SEQ ID NO: 3044 - DNA, 20 bp, Artificial Sequence
  Description of Artificial Sequence: Synthetic oligonucleotide
tcagcttcccaacttcaccg

SEQ ID NO: 3045 - DNA, 20 bp, Artificial Sequence
  Description of Artificial Sequence: Synthetic oligonucleotide
cttggtgcagaggagcaatg

SEQ ID NO: 3046 - DNA, 20 bp, Artificial Sequence
  Description of Artificial Sequence: Synthetic oligonucleotide
actctgttcgatattcatca

SEQ ID NO: 3047 - DNA, 20 bp, Artificial Sequence
  Description of Artificial Sequence: Synthetic oligonucleotide
atgtcagcagtatgattgtg

SEQ ID NO: 3048 - DNA, 20 bp, Artificial Sequence
  Description of Artificial Sequence: Synthetic oligonucleotide
gctgatgcaagtgaagactg

SEQ ID NO: 3049 - DNA, 20 bp, Artificial Sequence
  Description of Artificial Sequence: Synthetic oligonucleotide
tcaggaaatgatccgcacag

SEQ ID NO: 3050 - DNA, 20 bp, Artificial Sequence
  Description of Artificial Sequence: Synthetic oligonucleotide
aatagggtgaatgatccggg

SEQ ID NO: 3051 - DNA, 20 bp, Artificial Sequence
  Description of Artificial Sequence: Synthetic oligonucleotide
cgtgctggacatcatccgag

SEQ ID NO: 3052 - DNA, 20 bp, Artificial Sequence
  Description of Artificial Sequence: Synthetic oligonucleotide
ttattaatgtagcctcacgg

SEQ ID NO: 3053 - DNA, 20 bp, Artificial Sequence
  Description of Artificial Sequence: Synthetic oligonucleotide
ccatcatcaggtgaactgtg

SEQ ID NO: 3054 - DNA, 20 bp, Artificial Sequence
  Description of Artificial Sequence: Synthetic oligonucleotide
gtttgactggttcagcagtg

SEQ ID NO: 3055 - DNA, 20 bp, Artificial Sequence
  Description of Artificial Sequence: Synthetic oligonucleotide
agcaaatcttctaatccatg

SEQ ID NO: 3056 - DNA, 20 bp, Artificial Sequence
  Description of Artificial Sequence: Synthetic oligonucleotide
ctgcaactatgactccatgg

SEQ ID NO: 3057 - DNA, 20 bp, Artificial Sequence
  Description of Artificial Sequence: Synthetic oligonucleotide
cgtgttggagagaccgctac

SEQ ID NO: 3058 - DNA, 20 bp, Artificial Sequence
  Description of Artificial Sequence: Synthetic oligonucleotide
ccgctaccggtgaaccagcg

SEQ ID NO: 3059 - DNA, 20 bp, Artificial Sequence
  Description of Artificial Sequence: Synthetic oligonucleotide
gagatcaacccatacctgct

SEQ ID NO: 3060 - DNA, 20 bp, Artificial Sequence
  Description of Artificial Sequence: Synthetic oligonucleotide
ggctacgtggaaacccctcg

SEQ ID NO: 3061 - DNA, 20 bp, Artificial Sequence
  Description of Artificial Sequence: Synthetic oligonucleotide
cattgtagagacaccaccca

SEQ ID NO: 3062 - DNA, 20 bp, Artificial Sequence
  Description of Artificial Sequence: Synthetic oligonucleotide
tgtagagacaccacccatgg

SEQ ID NO: 3063 - DNA, 20 bp, Artificial Sequence
  Description of Artificial Sequence: Synthetic oligonucleotide
tgtgggcattgtgggctacg

SEQ ID NO: 3064 - DNA, 20 bp, Artificial Sequence
  Description of Artificial Sequence: Synthetic oligonucleotide
atataatgacttcatcaaca

SEQ ID NO: 3065 - DNA, 20 bp, Artificial Sequence
  Description of Artificial Sequence: Synthetic oligonucleotide
tgttgtgaagaagaagaaca

SEQ ID NO: 3066 - DNA, 20 bp, Artificial Sequence
  Description of Artificial Sequence: Synthetic oligonucleotide
gtgtacgcttatcctgactg

SEQ ID NO: 3067 - DNA, 20 bp, Artificial Sequence
  Description of Artificial Sequence: Synthetic oligonucleotide
aaccaatgtaggtgtctggg

SEQ ID NO: 3068 - DNA, 20 bp, Artificial Sequence
  Description of Artificial Sequence: Synthetic oligonucleotide
ccaggacgagatgagcgatg

SEQ ID NO: 3069 - DNA, 20 bp, Artificial Sequence
  Description of Artificial Sequence: Synthetic oligonucleotide
tgtgtcactccattgctggg

SEQ ID NO: 3070 - DNA, 20 bp, Artificial Sequence
  Description of Artificial Sequence: Synthetic oligonucleotide
ttttgacatcatagaccggg

SEQ ID NO: 3071 - DNA, 20 bp, Artificial Sequence
  Description of Artificial Sequence: Synthetic oligonucleotide
tgtagggtgatgatttccct
